(19) United States
(12) Patent Application Publication
(10) Pub. No.: US 2005/0186577 A1
(43) Pub. Date: Aug. 25, 2005

(54) Breast cancer prognostics

(76) Inventor: Yixin Wang, San Diego, CA (US)

Correspondence Address: PHILIP S. JOHNSON;JOHNSON & JOHNSON, ONE JOHNSON & JOHNSON PLAZA, NEW BRUNSWICK, NJ, 08933-7003, US

(21) Appl. No.: 10/783,271

(22) Filed: Feb. 20, 2004

(51) Int. Cl. C12Q 1/68

(52) U.S. Cl. 435/6

(57) ABSTRACT

A method of providing a prognosis of breast cancer is conducted by analyzing the expression of a group of genes. Gene expresson profiles in a variety of medium such as microarrays are included as are kits that contain them.

### BACKGROUND

[0001] This invention relates to prognostics for breast cancer based on the gene expression profiles of biological samples.

[0002] Breast cancer is a heterogeneous disease that exhibits a wide variety of clinical presentations, histological types and growth rates. Because of these variations, determining prognosis for an individual patient at the time of initial diagnosis requires careful assessment of multiple clinical and pathological parameters, but the currently used traditional prognostic factors are not sufficient. In primary breast cancer, metastasis to axillary lymph nodes is the most important clinical prognostic factor. Approximately 60% of lymph-node-negative (LNN) patients are cured by local-regional treatment alone. Many patients that relapse eventually die due to resistance to systemic endocrine or chemotherapy given as treatment for recurrent disease. It is particularly important to identify the LNN patients that are at high risk for relapse since they generally need adjuvant systemic therapy after primary surgery. It would also be beneficial to more confidently be able to avoid administering adjuvant therapy to LNN patients that do not require it.

[0003] Currently in LNN patients, the decision to apply adjuvant therapy or not after surgical removal of the primary tumor, and which type (endocrine- and/or chemotherapy), largely depends on patient's age, menopausal status, tumor size, tumor grade, and the steroid hormone-receptor status. These factors are accounted for in guidelines such as St. Gallen criteria and the National Institutes of Health (NIH) consensus criteria. Based on these criteria more than 85%-90% of the LNN patients would be candidates to receive adjuvant systemic therapy.

[0004] There is clearly a need to identify better prognostic factors for guiding selection of treatment choices.

### SUMMARY OF THE INVENTION

[0005] The invention is a method of assessing the likelihood of a recurrence of breast cancer in a patient diagnosed with or treated for breast cancer. The method involves the analysis of a gene expression profile made up of a combination of genes from the genes found in SEQ ID NO 36-111.

[0006] In one aspect of the invention, the gene expression profile includes at least 35 genes (SEQ ID NO 1-35).

[0007] In another aspect of the invention, the gene expression profile includes at least 60 particular genes (SEQ ID NO 36-95). This profile is particularly useful in prognosticating ER positive patients.

[0008] In another aspect of the invention, the gene expression profile includes at least 16 particular genes (SEQ ID NO 96-111). This profile is particularly useful in prognosticating ER negative patients.

[0009] In another aspect of the invention, the gene expression profile includes at least 76 particular genes (SEQ ID NO 36-111).

[0010] Articles used in practicing the methods are also an aspect of the invention. Such articles include gene expression profiles or representations of them that are fixed in machine-readable media such as computer readable media.

[0011] Articles used to identify gene expression profiles can also include substrates or surfaces, such as microarrays, to capture and/or indicate the presence, absence, or degree of gene expression.

[0012] In yet another aspect of the invention, kits include reagents for conducting the gene expression analysis prognostic of breast caner recurrence.

### BRIEF DESCRIPTION OF THE DRAWINGS

[0013] FIG. 1 is a Receiver Operator Curve (ROC) produced using the 171 patients in the testing set and used AUC to assess the performance of the 76 gene signature.

[0014] FIG. 2 is a standard Kaplan-Meier Plot constructed for distant metastasis free survival (DMFS) as a function of the 76 gene-signature. The vertical axis shows the probability of disease-free survival among patients in each class.

[0015] FIG. 3 is a standard Kaplan-Meier Plot constructed for overall survival (OS) as a function of the 76 gene-signature. The vertical axis shows the probability of disease-free survival among patients in each class.

### DETAILED DESCRIPTION

[0016] The mere presence or absence of particular nucleic acid sequences in a tissue sample has only rarely been found to have diagnostic or prognostic value. Information about the expression of various proteins, peptides or mRNA, on the other hand, is increasingly viewed as important. The mere presence of nucleic acid sequences having the potential to express proteins, peptides, or mRNA ( such sequences referred to as “genes”) within the genome by itself is not determinative of whether a protein, peptide, or mRNA is expressed in a given cell. Whether or not a given gene capable of expressing proteins, peptides, or mRNA does so and to what extent such expression occurs, if at all, is determined by a variety of complex factors. Irrespective of difficulties in understanding and assessing these factors, assaying gene expression can provide useful information about the occurrence of important events such as tumerogenesis, metastasis, apoptosis, and other clinically relevant phenomena. Relative indications of the degree to which genes are active or inactive can be found in gene expression profiles. The gene expression profiles of this invention are used to provide a prognosis and treat patients for breast cancer.

[0017] Sample preparation requires the collection of patient samples. Patient samples used in the inventive method are those that are suspected of containing diseased cells such as epithelial cells taken from the primary tumor in a breast sample. Samples taken from surgical margins are also preferred. Most preferably, however, the sample is taken from a lymph node obtained from a breast cancer surgery. Laser Capture Microdisection (LCM) technology is one way to select the cells to be studied, minimizing variability caused by cell type heterogeneity. Consequently, moderate or small changes in gene expression between normal and cancerous cells can be readily detected. Samples can also comprise circulating epithelial cells extracted from peripheral blood. These can be obtained according to a number of methods but the most preferred method is the magnetic separation technique described in U.S. Pat. No. 6,136,182 (assigned to Immunivest Corporation) which is incorporated herein by reference. Once the sample containing the cells of interest has been obtained, RNA is extracted and amplified and a gene expression profile is obtained, preferably via micro-array, for genes in the appropriate portfolios.

[0018] Preferred methods for establishing gene expression profiles include determining the amount of RNA that is produced by a gene that can code for a protein or peptide. This is accomplished by reverse transcriptase PCR (RT-PCR), competitive RT-PCR, real time RT-PCR, differential display RT-PCR, Northern Blot analysis and other related tests. While it is possible to conduct these techniques using individual PCR reactions, it is best to amplify complimentary DNA (cDNA) or complimentary RNA (cRNA) produced from mRNA and analyze it via microarray. A number of different array configurations and methods for their production are known to those of skill in the art and are described in U.S. Pat. Nos. such as: 5,445,934; 5,532,128; 5,556,752; 5,242,974; 5,384,261; 5,405,783; 5,412,087; 5,424,186; 5,429,807; 5,436,327; 5,472,672; 5,527,681; 5,529,756; 5,545,531; 5,554,501; 5,561,071; 5,571,639; 5,593,839; 5,599,695; 5,624,711; 5,658,734; and 5,700,637; the disclosures of which are incorporated herein by reference.

[0019] Microarray technology allows for the measurement of the steady-state mRNA level of thousands of genes simultaneously thereby presenting a powerful tool for identifying effects such as the onset, arrest, or modulation of uncontrolled cell proliferation. Two microarray technologies are currently in wide use. The first are cDNA arrays and the second are oligonucleotide arrays. Although differences exist in the construction of these chips, essentially all downstream data analysis and output are the same. The product of these analyses are typically measurements of the intensity of the signal received from a labeled probe used to detect a cDNA sequence from the sample that hybridizes to a nucleic acid sequence at a known location on the microarray. Typically, the intensity of the signal is proportional to the quantity of cDNA, and thus mRNA, expressed in the sample cells. A large number of such techniques are available and useful. Preferred methods for determining gene expression can be found in U.S. Pat. No. 6,271,002 to Linsley, et al.; U.S. Pat. No. 6,218,122 to Friend, et al.; U.S. Pat. No. 6,218,114 to Peck, et al.; and U.S. Pat. No. 6,004,755 to Wang, et al., the disclosure of each of which is incorporated herein by reference.

[0020] Analysis of the expression levels is conducted by comparing such signal intensities. This is best done by generating a ratio matrix of the expression intensities of genes in a test sample versus those in a control sample. For instance, the gene expression intensities from a diseased tissue can be compared with the expression intensities generated from normal tissue of the same type (e.g., diseased breast tissue sample vs. normal breast tissue sample). A ratio of these expression intensities indicates the fold-change in gene expression between the test and control samples.

[0021] Gene expression profiles can also be displayed in a number of ways. The most common method is to arrange raw fluorescence intensities or ratio matrix into a graphical dendogram where columns indicate test samples and rows indicate genes. The data is arranged so genes that have similar expression profiles are proximal to each other. The expression ratio for each gene is visualized as a color. For example, a ratio less than one (indicating down-regulation) may appear in the blue portion of the spectrum while a ratio greater than one (indicating up-regulation) may appear as a color in the red portion of the spectrum. Commercially available computer software programs are available to display such data including “GENESPRING” from Silicon Genetics, Inc. and “DISCOVERY” and “INFER” software from Partek, Inc.

[0022] Modulated genes used in the methods of the invention are described in the Examples. The genes that are differentially expressed are either up regulated or down regulated in patients with a relapse of colon cancer relative to those without a relapse. Up regulation and down regulation are relative terms meaning that a detectable difference (beyond the contribution of noise in the system used to measure it) is found in the amount of expression of the genes relative to some baseline. In this case, the baseline is the measured gene expression of a non-relapsing patient. The genes of interest in the diseased cells (from the relapsing patients) are then either up regulated or down regulated relative to the baseline level using the same measurement method. Diseased, in this context, refers to an alteration of the state of a body that interrupts or disturbs, or has the potential to disturb, proper performance of bodily functions as occurs with the uncontrolled proliferation of cells. Someone is diagnosed with a disease when some aspect of that person's genotype or phenotype is consistent with the presence of the disease. However, the act of conducting a diagnosis or prognosis includes the determination of disease/status issues such as determining the likelihood of relapse and therapy monitoring. In therapy monitoring, clinical judgments are made regarding the effect of a given course of therapy by comparing the expression of genes over time to determine whether the gene expression profiles have changed or are changing to patterns more consistent with normal tissue.

[0023] Preferably, levels of up and down regulation are distinguished based on fold changes of the intensity measurements of hybridized microarray probes. A 2.0 fold difference is preferred for making such distinctions (or a p-value less than 0.05). That is, before a gene is said to be differentially expressed in diseased/relapsing versus normal/non-relapsing cells, the diseased cell is found to yield at least 2 times more, or 2 times less intensity than the normal cells. The greater the fold difference, the more preferred is use of the gene as a diagnostic or prognostic tool. Genes selected for the gene expression profiles of the instant invention have expression levels that result in the generation of a signal that is distinguishable from those of the normal or non-modulated genes by an amount that exceeds background using clinical laboratory instrumentation.

[0024] Statistical values can be used to confidently distinguish modulated from non-modulated genes and noise. Statistical tests find the genes most significantly different between diverse groups of samples. The Student's t-test is an example of a robust statistical test that can be used to find significant differences between two groups. The lower the p-value, the more compelling the evidence that the gene is showing a difference between the different groups. Nevertheless, since microarrays measure more than one gene at a time, tens of thousands of statistical tests may be asked at one time. Because of this, one is unlikely to see small p-values just by chance and adjustments for this using a Sidak correction as well as a randomization/permutation experiment can be made. A p-value less than 0.05 by the t-test is evidence that the gene is significantly different. More compelling evidence is a p-value less then 0.05 after the Sidak correction is factored in. For a large number of samples in each group, a p-value less than 0.05 after the randomization/permutation test is the most compelling evidence of a significant difference.

[0025] Another parameter that can be used to select genes that generate a signal that is greater than that of the non-modulated gene or noise is the use of a measurement of absolute signal difference. Preferably, the signal generated by the modulated gene expression is at least 20% different than those of the normal or non-modulated gene (on an absolute basis). It is even more preferred that such genes produce expression patterns that are at least 30% different than those of normal or non-modulated genes.

[0026] Genes can be grouped so that information obtained about the set of genes in the group provides a sound basis for making a clinically relevant judgment such as a diagnosis, prognosis, or treatment choice. These sets of genes make up the portfolios of the invention. In this case, the judgments supported by the portfolios involve breast cancer and its chance of recurrence. As with most diagnostic markers, it is often desirable to use the fewest number of markers sufficient to make a correct medical judgment. This prevents a delay in treatment pending further analysis as well inappropriate use of time and resources.

[0027] Preferably, portfolios are established such that the combination of genes in the portfolio exhibit improved sensitivity and specificity relative to individual genes or randomly selected combinations of genes. In the context of the instant invention, the sensitivity of the portfolio can be reflected in the fold differences exhibited by a gene's expression in the diseased state relative to the normal state. Specificity can be reflected in statistical measurements of the correlation of the signaling of gene expression with the condition of interest. For example, standard deviation can be a used as such a measurement. In considering a group of genes for inclusion in a portfolio, a small standard deviation in expression measurements correlates with greater specificity. Other measurements of variation such as correlation coefficients can also be used in this capacity.

[0028] One method of establishing gene expression portfolios is through the use of optimization algorithms such as the mean variance algorithm widely used in establishing stock portfolios. This method is described in detail in the patent application entitled “Portfolio Selection” by Tim Jatkoe, et. al., filed on Mar. 21, 2003. Essentially, the method calls for the establishment of a set of inputs (stocks in financial applications, expression as measured by intensity here) that will optimize the return (e.g., signal that is generated) one receives for using it while minimizing the variability of the return. Many commercial software programs are available to conduct such operations. “Wagner Associates Mean-Variance Optimization Application”, referred to as “Wagner Software” throughout this specification, is preferred. This software uses functions from the “Wagner Associates Mean-Variance Optimization Library” to determine an efficient frontier and optimal portfolios in the Markowitz sense is preferred. Use of this type of software requires that microarray data be transformed so that it can be treated as an input in the way stock return and risk measurements are used when the software is used for its intended financial analysis purposes.

[0029] The process of selecting a portfolio can also include the application of heuristic rules. Preferably, such rules are formulated based on biology and an understanding of the technology used to produce clinical results. More preferably, they are applied to output from the optimization method. For example, the mean variance method of portfolio selection can be applied to microarray data for a number of genes differentially expressed in subjects with breast cancer. Output from the method would be an optimized set of genes that could include some genes that are expressed in peripheral blood as well as in diseased tissue. If samples used in the testing method are obtained from peripheral blood and certain genes differentially expressed in instances of breast cancer could also be differentially expressed in peripheral blood, then a heuristic rule can be applied in which a portfolio is selected from the efficient frontier excluding those that are differentially expressed in peripheral blood. Of course, the rule can be applied prior to the formation of the efficient frontier by, for example, applying the rule during data pre-selection.

[0030] Other heuristic rules can be applied that are not necessarily related to the biology in question. For example, one can apply a rule that only a prescribed percentage of the portfolio can be represented by a particular gene or group of genes. Commercially available software such as the Wagner Software readily accommodates these types of heuristics. This can be useful, for example, when factors other than accuracy and precision (e.g., anticipated licensing fees) have an impact on the desirability of including one or more genes.

[0031] One method of the invention involves comparing gene expression profiles for various genes (or portfolios) to ascribe prognoses. The gene expression profiles of each of the genes comprising the portfolio are fixed in a medium such as a computer readable medium. This can take a number of forms. For example, a table can be established into which the range of signals (e.g., intensity measurements) indicative of disease is input. Actual patient data can then be compared to the values in the table to determine whether the patient samples are normal or diseased. In a more sophisticated embodiment, patterns of the expression signals (e.g., flourescent intensity) are recorded digitally or graphically. The gene expression patterns from the gene portfolios used in conjunction with patient samples are then compared to the expression patterns. Pattern comparison software can then be used to determine whether the patient samples have a pattern indicative of recurrence of the disease. Of course, these comparisons can also be used to determine whether the patient is not likely to experience disease recurrence. The expression profiles of the samples are then compared to the portfolio of a control cell. If the sample expression patterns are consistent with the expression pattern for recurrence of a breast cancer then (in the absence of countervailing medical considerations) the patient is treated as one would treat a relapse patient. If the sample expression patterns are consistent with the expression pattern from the normal/control cell then the patient is diagnosed negative for breast cancer.

[0032] The preferred profiles of this invention are the 35-gene portfolio made up of the genes of SEQ ID NO 1-35, the 60-gene portfolio made up of the genes of SEQ ID NO 36-95 which is best used to prognosticate ER positive patients, and the 16-gene portfolio made up of genes of SEQ ID NO 96-111 which is best used to prognosticate ER negative patients. Most preferably, the portfolio is made up of genes of SEQ ID NO 36-111. This most preferred portfolio best segregates breast cancer patients irrespective of ER status at high risk of relapse from those who are not. Once the high-risk patients are identified they can then be treated with adjuvant therapy.

[0033] In this invention, the most preferred method for analyzing the gene expression pattern of a patient to determine prognosis of colon cancer is through the use of a Cox hazard analysis program. Most preferably, the analysis is conducted using S-Plus software (commercially available from Insightful Corporation). Using such methods, a gene expression profile is compared to that of a profile that confidently represents relapse (i.e., expression levels for the combination of genes in the profile is indicative of relapse). The Cox hazard model with the established threshold is used to compare the similarity of the two profiles (known relapse versus patient) and then determines whether the patient profile exceeds the threshold. If it does, then the patient is classified as one who will relapse and is accorded treatment such as adjuvant therapy. If the patient profile does not exceed the threshold then they are classified as a non-relapsing patient. Other analytical tools can also be used to answer the same question such as, linear discriminate analysis, logistic regression and neural network approaches.

[0034] Numerous other well-known methods of pattern recognition are available. The following references provide some examples:

[0035] Weighted Voting:
[0036] Golub, T R., Slonim, D K., Tamaya, P., Huard, C., Gaasenbeek, M., Mesirov, J P., Coller, H., Loh, L., Downing, J R., Caligiuri, M A., Bloomfield, C D., Lander, E S. Molecular classification of cancer: class discovery and class prediction by gene expression monitoring. Science 286:531-537, 1999

[0037] Support Vector Machines:
[0038] Su, A I., Welsh, J B., Sapinoso, L M., Kern, S G., Dimitrov, P., Lapp, H., Schultz, P G., Powell, S M., Moskaluk, C A., Frierson, H F. Jr., Hampton, G M. Molecular classification of human carcinomas by use of gene expression signatures. Cancer Research 61:7388-93, 2001
[0039] Ramaswamy, S., Tamayo, P., Rifkin, R., Mukherjee, S., Yeang, C H., Angelo, M., Ladd, C., Reich, M., Latulippe, E., Mesirov, J P., Poggio, T., Gerald, W., Loda, M., Lander, E S., Gould, T R. Multiclass cancer diagnosis using tumor gene expression signatures Proceedings of the National Academy of Sciences of the USA 98:15149-15154, 2001

[0040] K-Nearest Neighbors:
[0041] Ramaswamy, S., Tamayo, P., Rifkin, R., Mukherjee, S., Yeang, C H., Angelo, M., Ladd, C., Reich, M., Latulippe, E., Mesirov, J P., Poggio, T., Gerald, W., Loda, M., Lander, E S., Gould, T R. Multiclass cancer diagnosis using tumor gene expression signatures Proceedings of the National Academy of Sciences of the USA 98:15149-15154, 2001

[0042] Correlation Coefficients:
[0043] van't Veer L J, Dai H, van de Vijver M J, He Y D, Hart A A, Mao M, Peterse H L, van der Kooy K, Marton M J, Witteveen A T, Schreiber G J, Kerkhoven R M, Roberts C, Linsley P S, Bernards R, Friend S H. Gene expression profiling predicts clinical outcome of breast cancer. Nature. 2002 January 31;415(6871):530-6.

[0044] The gene expression profiles of this invention can also be used in conjunction with other non-genetic diagnostic methods useful in cancer diagnosis, prognosis, or treatment monitoring. For example, in some circumstances it is beneficial to combine the diagnostic power of the gene expression based methods described above with data from conventional markers such as serum protein markers (e.g., Cancer Antigen 27.29 (CA 27.29)). A range of such markers exists including such analytes as CA 27.29. In one such method, blood is periodically taken from a treated patient and then subjected to an enzyme immunoassay for one of the serum markers described above. When the concentration of the marker suggests the return of tumors or failure of therapy, a sample source amenable to gene expression analysis is taken. Where a suspicious mass exists, a fine needle aspirate is taken and gene expression profiles of cells taken from the mass are then analyzed as described above. Alternatively, tissue samples may be taken from areas adjacent to the tissue from which a tumor was previously removed. This approach can be particularly useful when other testing produces ambiguous results.

[0045] Articles of this invention include representations of the gene expression profiles useful for treating, diagnosing, prognosticating, and otherwise assessing diseases. These profile representations are reduced to a medium that can be automatically read by a machine such as computer readable media (magnetic, optical, and the like). The articles can also include instructions for assessing the gene expression profiles in such media. For example, the articles may comprise a CD ROM having computer instructions for comparing gene expression profiles of the portfolios of genes described above. The articles may also have gene expression profiles digitally recorded therein so that they may be compared with gene expression data from patient samples. Alternatively, the profiles can be recorded in different representational format. A graphical recordation is one such format. Clustering algorithms such as those incorporated in “DISCOVERY” and “INFER” software from Partek, Inc. mentioned above can best assist in the visualization of such data.

[0046] Different types of articles of manufacture according to the invention are media or formatted assays used to reveal gene expression profiles. These can comprise, for example, microarrays in which sequence complements or probes are affixed to a matrix to which the sequences indicative of the genes of interest combine creating a readable determinant of their presence. Alternatively, articles according to the invention can be fashioned into reagent kits for conducting hybridization, amplification, and signal generation indicative of the level of expression of the genes of interest for detecting breast cancer.

[0047] Kits made according to the invention include formatted assays for determining the gene expression profiles. These can include all or some of the materials needed to conduct the assays such as reagents and instructions.

[0048] The invention is further illustrated by the following non-limiting examples.

### EXAMPLES

[0049] Genes analyzed according to this invention are typically related to full-length nucleic acid sequences that code for the production of a protein or peptide. One skilled in the art will recognize that identification of full-length sequences is not necessary from an analytical point of view. That is, portions of the sequences or ESTs can be selected according to well-known principles for which probes can be designed to assess gene expression for the corresponding gene.

### Example 1

### Sample Handling and Microarray Work

[0050] Fresh frozen tissue samples were collected from patients who had surgery for breast tumors. The samples that were used were from 286 breast cancer patients staged according to standard clinical diagnostics and pathology. Clinical outcomes of the patients were known. Characteristics of the samples and the patients from whom they were obtained are shown in Table 1. None of the patients from whom the samples were obtained received adjuvant or neo-adjuvant systemic therapy. Radiotherapy was applied to 248 patients (87%). Lymph node negativity was based on pathological examination. Estrogen Receptor (ER) and Progesterone Receptor (PgR) levels for 280 tumors were measured by standard pathology tests (EIA, IHC, etc.); cutoff=10 fmol/mg protein or >10% positive tumor cells. Of the 286 patients included, 104 showed evidence of distant metastasis within 5 years. Five patients died without evidence of disease and were censored at last follow-up. Eighty-three patients died after a previous relapse.

[0051] For isolation of RNA, 20 to 40 cryostat sections of 30 μm were cut from each sample, in total corresponding to approximately 100 mg of tissue. Before, in between, and after cutting the sections for RNA isolation, 5 μm sections were cut for hematoxylin and eosin staining to confirm the presence of tumor cells. Total RNA was isolated with RNAzol B (Campro Scientific, Veenendaal, Netherlands), and dissolved in DEPC (0.1%)-treated H₂O. About 2 ng of total RNA was resuspended in 10 ul of water and 2 rounds of the T7 RNA polymerase based amplification were performed to yield about 50 ug of amplified RNA.

[0052] Total RNA samples were only used if analysis by Agilent BioAnalyzer showed clear 18S and 28S peaks with no minor peaks presents and if the area under 28S and 18S bands was greater than 15% of total RNA area. Additionally, selection criteria included a 28S/18S ratio between 1.2 and 2.0. Biotinylated targets were prepared by using published methods (Affymetrix, CA) (24) and hybridized to Affymetrix oligonucleotide microarray U133a GeneChip containing a total of 22,000 probe sets. Arrays were scanned by using the standard Affymetrix protocol. For subsequent analysis, each probe set was considered as a separate gene. Expression values for each gene were calculated by using Affymetrix GeneChip analysis software MAS 5.0. Chips were rejected if the average intensity was less than 40 or if the background signal exceeded 100. In order to normalize the chip signals, all probe sets were scaled to a target intensity of 600 and scale mask files were not selected.

TABLE 1
Clinical and Pathological Characteristics of Patients
and Their Tumors

| | All | ER-positive | ER-negative | Validation |
|---|---|---|---|---|
| Characteristics | patients | training set | training set | set |
| Number | 286 | 80 | 35 | 171 |
| Age (mean ± SD) | 54 ± 12 | 54 ± 13 | 54 ± 13 | 54 ± 12 |
| ≦40 yr | 36 (13%) | 12 (15%) | 3 (9%) | 21 (12%) |
| 41-55 yr | 129 (45%) | 30 (38%) | 17 (49%) | 82 (48%) |
| 56-70 yr | 89 (31%) | 28 (35%) | 11 (31%) | 50 (29%) |
| >70 yr | 32 (11%) | 10 (13%) | 4 (11%) | 18 (11%) |
| Menopausal status | | | | |
| Premenopausal | 139 (49%) | 39 (49%) | 16 (46%) | 84 (49%) |
| Postmenopausal | 147 (51%) | 41 (51%) | 19 (54%) | 87 (51%) |
| Tumor size | | | | |
| T1 (<2 cm) | 146 (51%) | 38 (48%) | 14 (40%) | 94 (55%) |
| T2 (2-5 cm) | 131 (46%) | 41 (51%) | 19 (54%) | 72 (42%) |
| T3/4 (>5 cm) | 8 (3%) | 1 (1%) | 2 (6%) | 5 (3%) |
| Grade | | | | |
| Poor | 148 (52%) | 37 (46%) | 24 (69%) | 87 (51%) |
| Moderate | 42 (15%) | 12 (15%) | 3 (9%) | 27 (16%) |
| Good | 7 (2%) | 2 (3%) | 2 (6%) | 3 (2%) |
| Unknown | 89 (31%) | 29 (36%) | 6 (17%) | 54 (32%) |
| ER | | | | |
| Positive | 205 (72%) | 80 (100%) | 0 (0%) | 125 (73%) |
| Negative | 75 (26%) | 0 (0%) | 35 (100%) | 40 (23%) |
| PgR | | | | |
| Positive | 165 (58%) | 59 (74%) | 5 (14%) | 101 (59%) |
| Negative | 105 (37%) | 19 (24%) | 29 (83%) | 57 (33%) |
| Metastasis <5 years | | | | |
| Yes | 104 (36%) | 30 (38%) | 18 (51%) | 56 (33%) |
| No | 182 (64%) | 50 (63%) | 17 (49%) | 115 (67%) |

ER positive and PgR positive: >10 fmol/mg protein or >10% positive tumor cells.

### Example 2

### Statistical Analysis

[0053] Gene expression data were first subjected to a filter that included only genes called “present” in 2 or more samples. Of the 22,000 genes considered, 17,819 passed this filter and were used for hierarchical clustering. Prior to the clustering, each gene was divided by its median expression level in the patients to minimize the effect of the magnitude of expression of genes, and group together genes with similar patterns of expression in the clustering analysis. Average linkage hierarchical clustering was conducted on both the genes and the samples by using GeneSpring 6.0 software to identify patient subgroups with distinct genetic profiles.

[0054] In order to identify gene markers that can best discriminate between the patients who developed a distant metastasis and the ones who remained metastasis-free within 5 years, two supervised class prediction approaches were used. In the first approach all the 286 patients were divided into a training set of 80 patients and a testing set of 206 patients. The training set was used to select gene markers and to build a prognostic signature. The testing set was used for independent validation. In the second approach, the patients were first placed into one of the two subgroups stratified by ER status. Those with an ER>10 were placed in one group (ER positive; 211 patients) and those with an ER less than or equal to 10 were placed in a separate subgroup (ER negative; 75 patients). ER cutoff establishment is discussed in more detail below.

[0055] Each patient subgroup was then analyzed separately in order to select markers. The patients in the ER-positive subgroup were divided into a training set of 80 patients and a testing set of 131 patients (125 patients with ER levels above 10 and 6 patients with unknown ER levels). The patients in the ER-negative subgroup were divided into a training set of 35 patients and a testing set of 40 patients. The training set was used to select gene markers. The markers selected from each subgroup were combined to form a single signature to predict tumor metastasis for ER-positive and ER-negative patients as a whole in a subsequent independent validation. The sample size of the training set was determined by a re-sampling method to ensure its statistical confidence level.

[0056] The following statistical methods were used to analyze the training set in order to select gene markers. First, univariate Cox proportional hazards regression was used to identify genes whose expression levels were correlated with the length of DMFS. In order to minimize the effect of multiple testing, the Cox model was performed with bootstrapping of the patients in the training set. Genes were ranked by the average p value of the Cox regression analysis. To construct a multiple gene signature, combinations of gene markers were tested by adding one gene at a time according to the rank order. Receiver Operator Characteristic (ROC) analysis was performed to calculate the area under the curve (AUC) for each signature with increasing number of genes, and the number of genes was determined when the increase of AUC starts to plateau.

[0057] The relapse score was used to determine each patient's risk of distant metastasis. The score was defined as the linear combination of weighted expression signals with the standardized Cox regression coefficient as the weight.

$$Relapse Score = A \cdot I + {\sum }_{i = 1}^{60} I \cdot {w}_{i} {x}_{i} + B \cdot ( 1 - I ) + {\sum }_{j = 1}^{16} ( 1 - I ) \cdot {w}_{j} {x}_{j} where$$

$$I = \{ \begin{matrix}1 & if ER level > 10 \\ 0 & if ER level \leq 10\end{matrix}$$

[0058] A and B are constants
[0059] wᵢ is the standardized Cox regression coefficient
[0060] xᵢ is the expression value in log 2 scale
   The gene signature and the cutoff were validated in the testing set. ROC analysis was performed for the signature. Kaplan-Meier survival plots and log-rank tests were used to assess the differences in time to distant metastasis of the predicted high and low risk groups. Sensitivity was defined as the percent of the distant metastasis patients that were predicted correctly by the gene signature, and specificity was defined as the percent of the patients free of distant recurrence that were predicted as being free of recurrence by the gene signature. Odds ratio (OR) was calculated as the ratio of the probabilities of distant metastasis between the predicted relapse patients and the predicted relapse-free patients.

[0061] Univariate and multivariate analyses using the Cox proportional hazard regression were performed on the individual clinical parameters of the patients and the combination of the clinical parameters and the gene signature. The hazard ratio (HR) and its 95% confidence interval (CI) were derived from these results. All the statistical analyses were performed using S-Plus 6 software (Insightful, VA).

[0062] The validation group of 171 patients, with 125 ER-positive and 40 ER-negative tumors combined (6 patients with unknown ER status), was not different from the total group of 286 patients with respect to any of the patients or tumor characteristics (for all factors the p value was >0.2).

[0063] Unsupervised hierarchical clustering analysis enabled a grouping of the 286 patients on the basis of the similarities of their expression profiles measured over 17,000 informative genes. Two distinct subgroups of patients were found in the clustering result. Further examination of this result showed that the classification is highly correlated to the ER status of the patients. Using the biochemical analysis on ER, 205 patients showed a ER level above 10 and were classified as ER positive tumor while 75 patients gave a ER level below 10 and were classified as ER negative tumor. Based on the result of the clustering analysis, patients were grouped as ER positive samples and as ER negative samples. A chi square test produced a p value of 2.27×10⁻²³, indicating that the classification on ER status by the two methods was highly consistent.

[0064] Using the first approach to identifying gene markers described above, thirty-five genes (SEQ ID NO 1-35) were selected from 80 patients in the training set and a Cox model to predict the occurrence of distant metastasis was built. The performance of this 35-gene signature on the testing set of 206 patients gave a sensitivity of 90% (60 of 67) and a specificity of 29% (41 of 139). This performance indicates that the patients that have the RS above the threshold of the prognostic signature have a 3.6-fold odds ratio (95% CI: 1.5-8.5; p=0.043) to develop tumor metastasis within 5 years compared with those that have the relapse score below the threshold of the prognostic signature.

[0065] In the second approach to identifying gene markers described above via division of patient subgroup based on ER status, seventy-six genes were selected from the patients in the training sets. Sixty genes were selected for the ER-positive group (SEQ ID NO 36-95). Sixteen genes were selected for the ER-negative group (SEQ ID NO 96-111), a patient group which previously had no genetic basis for prognosis. Taking together the selected genes (SEQ ID NO 36-111) and ER, a Cox model to predict patient recurrence was built for the LNN patients as a whole, i.e., for ER-positive and ER-negative patients combined. The 76-gene portfolio (and its component 16 and 60 gene portfolios) is summarized in Table 2.

[0066] A ROC curve was produced using the 171 patients in the testing set and used AUC to assess the performance of the signature. The 76-gene predictor gave an AUC value of 0.68 (FIG. 1). The validation result of the 76-gene prognostic signature displayed a performance on the testing set with a sensitivity of 93% (52 of 56) and a specificity of 47% (54 of 115). This performance indicates that the patients that have the relapse score above the threshold of the prognostic signature have a 11.5-fold odds ratio (95% CI: 3.9-33.9; p<0.0001) to develop a distant metastasis within 5 years compared with those that have the relapse score below the threshold of the prognostic signature. In addition, the Kaplan-Meier analyses for distant metastasis free survival (DMFS) and overall survival (OS) as a function of the 76 gene-signature showed highly significant differences in the time to metastasis (FIG. 2) (HR: 5.50, 95% CI: 2.51-12.1) and death (FIG. 3) (HR: 6.93, 95% CI: 2.76-11.4) between the group predicted with good prognosis and the group predicted with poor prognosis (p value of <0.0001 for both). At 60 and 80 months, the respective differences in DMFS between the good and poor prognosis groups were 40% (93% vs. 53%) and 38% (88% vs. 50%) in the analysis of DMFS, and 27% (97% vs. 70%) and 31% (95% vs. 64%) in the analysis of OS (FIG. 3).

[0067] In additional analyses on the validation set of 171 LNN patients, the performance of the 76-gene signature was evaluated separately in the analysis of DMFS and OS for 84 premenopausal, 87 postmenopausal patients, and the 79 patients with a tumor size ranging from 10 to 20 mm representing a group of patients that are difficult to predict outcome based on clinical data. The results show that the signature predicts early metastasis and death for both premenopausal (HR: 9.0, 95% CI: 2.14-38.1, p=0.0027; and HR: 8.7, 95% CI: 2.07-37, p=0.0032, respectively) and postmenopausal patients (HR: 4.0, 95% CI: 1.57-10.4, p=0.0039; and HR: 3.84, 95% CI: 1.49-9.89, p=0.0053). Furthermore, for the patients with a tumor size between 10 and 20 mm the 76-gene signature was a strong prognostic factor in the analysis for DMFS (HR: 13.2, 95% Cl: 3.13-55.4; p=0.0004) and OS (HR: 12.6, 95% CI: 3.0-53.2, p=0.0005). Patients with this tumor size had been among the most difficult for physicians to prognosticate.

[0068] The results of the univariate and multivariate Cox regression analysis are summarized in Table 3. In the univariate result, besides the 76-gene signature only grade of differentiation was statistically significant and moderate/good differentiation was associated with favorable DMFS. In the multivariate Cox proportional hazards regression the estimated HR for the occurrence of tumor metastasis within 5 years is 6.38 (95% CI: 2.67-15.3; p=3×10⁻⁵) indicating that the 76-gene set represents an independent prognostic signature that is strongly associated with a higher risk of tumor metastasis and death. Portfolios can also be made using combinations of genes selected from within the 76-gene signature. Smaller gene expression portfolios would necessarily have lessened predictive values but can be useful if the clinician is willing to accept lower sensitivity and/or specificity. This can be particularly beneficial if the prognostic employs the smaller portfolio in combination with other diagnostic or prognostic tools or portfolios.

TABLE 2
Gene Expression Portfolio

| | Std. Cox | Cox | Gene |
|---|---|---|---|
| SEQ ID NO. | coefficient | p value | description |
| Seq ID No. 36 | −3.830 | 0.00005 | gb: AF123759.1 /DEF = Homo sapiens putative transmembrane |
| | | | protein (CLN8) mRNA, complete cds. |
| Seq ID No. 37 | −3.865 | 0.00001 | gb: NM_016548.1 /DEF = Homo sapiens golgi membrane. |
| | | | protein GP73 (LOC51280) |
| Seq ID No. 38 | 3.630 | 0.00002 | gb: NM_020470.1 /DEF = Homo sapiens putative transmembrane |
| | | | protein; homolog of yeast Golgi membrane protein Yif1p |
| Seq ID No. 39 | −3.471 | 0.00016 | gb: NM_001562.1 /DEF = Homo sapiens interleukin |
| | | | 18 (interferon-gamma-inducing factor) (IL18) |
| Seq ID No. 40 | 3.506 | 0.00008 | Consensus includes gb: BE748755 /heterochromatin- |
| | | | like protein 1 |
| Seq ID No. 41 | −3.476 | 0.00001 | gb: BC002671.1 /DEF = Homo sapiens, dual specificity |
| | | | phosphatase 4 |
| Seq ID No. 42 | 3.392 | 0.00006 | gb: NM_002710.1 /DEF = Homo sapiens protein phosphatase 1, |
| | | | catalytic subunit, gamma isoform (PPP1CC) |
| Seq ID No. 43 | −3.353 | 0.00080 | gb: NM_006720.1 /DEF = Homo sapiens actin binding LIM |
| | | | protein 1 (ABLIM), transcript variant ABLIM-s |
| Seq ID No. 44 | −3.301 | 0.00038 | gb: AF114013.1 /DEF = Homo sapiens tumor necrosis |
| | | | factor-related death ligand-1gamma |
| Seq ID No. 45 | 3.101 | 0.00033 | Consensus includes gb: AI636233 five-span transmembrane |
| | | | protein M83 |
| Seq ID No. 46 | −3.174 | 0.00128 | gb: NM_000064.1 /DEF = Homo sapiens complement |
| | | | component 3 (C3) |
| Seq ID No. 47 | 3.083 | 0.00020 | gb: NM_017760.1 /DEF = Homo sapiens hypothetical |
| | | | protein FLJ20311 |
| Seq ID No. 48 | 3.336 | 0.00005 | gb: NM_013279.1 /DEF = Homo sapiens chromosome |
| | | | 11open reading frame 9 (C11ORF9) |
| Seq ID No. 49 | −3.054 | 0.00063 | Consensus includes gb: AL523310 putative translation |
| | | | initiation factor |
| Seq ID No. 50 | −3.025 | 0.00332 | gb: AF220152.2 /DEF = Homo sapiens TACC2 Mrna |
| Seq ID No. 51 | 3.095 | 0.00044 | gb: NM_005496.1 /DEF = Homo sapiens chromosome- |
| | | | associated polypeptide C (CAP-C) |
| Seq ID No. 52 | −3.175 | 0.00031 | gb: NM_013936.1 /DEF = Homo sapiens olfactory receptor, |
| | | | family 12, subfamily D, member 2 (OR12D2) |
| Seq ID No. 53 | −3.082 | 0.00086 | gb: AF125507.1 /DEF = Homo sapiens origin recognition |
| | | | complex subunit 3 (ORC3) |
| Seq ID No. 54 | 3.058 | 0.00016 | gb: NM_014109.1 /DEF = Homo sapiens PRO2000 protein |
| | | | (PRO2000) |
| Seq ID No. 55 | 3.085 | 0.00009 | gb: AL136877.1 /SMC4 (structural maintenance of |
| | | | chromosomes 4, yeast)-like 1 /FL = gb: AB019987.1 |
| | | | gb: NM_005496.1 gb: AL136877.1 |
| Seq ID No. 56 | −2.992 | 0.00040 | gb: NM_014796.1 /DEF = Homo sapiens KIAA0748 |
| | | | gene product (KIAA0748) |
| Seq ID No. 57 | −2.791 | 0.00020 | gb: NM_001394.2 /DEF = Homo sapiens dual specificity phosphatase |
| | | | 4 (DUSP4) |
| Seq ID No. 58 | −2.948 | 0.00039 | Consensus includes gb: AI493245 /CD44 antigen |
| | | | (homing function and Indian blood group system) |
| Seq ID No. 59 | 2.931 | 0.00020 | gb: NM_005030.1 /DEF = Homo sapiens polo |
| | | | (Drosophia)-like kinase (PLK) |
| Seq ID No. 60 | −2.896 | 0.00052 | gb: NM_006314.1 /DEF = Homo sapiens connector enhancer |
| | | | of KSR-like (Drosophila kinase suppressor of ras) (CNK1) |
| Seq ID No. 61 | 2.924 | 0.00050 | gb: NM_003543.2 /DEF = Homo sapiens H4 histone family, |
| | | | member H (H4FH) |
| Seq ID No. 62 | 2.915 | 0.00055 | gb: NM_004111.3 /DEF = Homo sapiens flap structure- |
| | | | specific endonuclease 1 (FEN1) |
| Seq ID No. 63 | −2.968 | 0.00099 | gb: NM_004470.1 /DEF = Homo sapiens FK506-binding |
| | | | protein 2 (13 kD) (FKBP2) |
| Seq ID No. 64 | 2.824 | 0.00086 | gb: BC005978.1 /DEF = Homo sapiens, karyopherin alpha |
| | | | 2 (RAG cohort 1, importin alpha 1) |
| Seq ID No. 65 | −2.777 | 0.00398 | gb: NM_015997.1 /DEF = Homo sapiens CGI-41 protein |
| | | | (LOC51093) |
| Seq ID No. 66 | −2.635 | 0.00160 | gb: NM_030819.1 /DEF = Homo sapiens hypothetical |
| | | | protein MGC11335 (MGC11335) |
| Seq ID No. 67 | −2.854 | 0.00053 | gb: BC006155.1 /DEF = Homo sapiens, clone |
| | | | MGC: 13188 |
| Seq ID No. 68 | 2.842 | 0.00051 | gb: NM_024629.1 /DEF = Homo sapiens hypothetical |
| | | | protein FLJ23468 (FLJ23468) |
| Seq ID No. 69 | −2.835 | 0.00033 | Consensus includes gb: AA772093 /neuralized (Drosophila)- |
| | | | like /FL = gb: U87864.1 gb: AF029729.1 gb: NM_004210.1 |
| Seq ID No. 70 | 2.777 | 0.00164 | gb: NM_007192.1 /DEF = Homo sapiens chromatin-specific |
| | | | transcription elongation factor, 140 kDa subunit (FACTP140) |
| Seq ID No. 71 | −2.759 | 0.00222 | Consensus includes gb: U07802 /DEF = Human |
| | | | Tis11d gene |
| Seq ID No. 72 | −2.745 | 0.00086 | gb: NM_001175.1 /DEF = Homo sapiens Rho GDP |
| | | | dissociation inhibitor (GDI) beta (ARHGDIB) |
| Seq ID No. 73 | 2.790 | 0.00049 | gb: NM_002803.1 /DEF = Homo sapiens proteasome |
| | | | (prosome, macropain) 26S subunit, ATPase, 2 (PSMC2) |
| Seq ID No. 74 | 2.883 | 0.00031 | gb: NM_017612.1 /DEF = Homo sapiens hypothetical |
| | | | protein DKFZp434E2220 (DKFZp434E2220) |
| Seq ID No. 75 | −2.794 | 0.00139 | Consensus includes gb: R39094 /KIAA1085 protein |
| Seq ID No. 76 | −2.743 | 0.00088 | gb: BC004372.1 /DEF = Homo sapiens, Similar to CD44 |
| | | | antigen (homing function and Indian blood group system) |
| Seq ID No. 77 | −2.761 | 0.00164 | Consensus includes gb: AL117652.1 /DEF = Homo |
| | | | sapiens mRNA |
| Seq ID No. 78 | −2.831 | 0.00535 | gb: NM_006416.1 /DEF = Homo sapiens solute carrier |
| | | | family 35 (CMP-sialic acid transporter), member 1 (SLC35A1) |
| Seq ID No. 79 | 2.659 | 0.00073 | gb: NM_004702.1 /DEF = Homo sapiens cyclin |
| | | | E2 (CCNE2) |
| Seq ID No. 80 | −2.715 | 0.00376 | Consensus includes gb: BF055474 /putative zinc |
| | | | finger protein NY-REN-34 antigen |
| Seq ID No. 81 | 2.836 | 0.00029 | gb: NM_006596.1 /DEF = Homo sapiens polymerase |
| | | | (DNA directed), theta (POLQ) |
| Seq ID No. 82 | −2.687 | 0.00438 | Consensus includes gb: AF041410.1 /DEF = Homo sapiens |
| | | | malignancy-associated protein |
| Seq ID No. 83 | −2.631 | 0.00226 | gb: M23254.1 /DEF = Human Ca2-activated neutral |
| | | | protease large subunit (CANP) |
| Seq ID No. 84 | −2.716 | 0.00089 | Consensus includes gb: AV693985 /ets variant |
| | | | gene 2 |
| Seq ID No. 85 | 2.703 | 0.00232 | gb: NM_017859.1 /DEF = Homo sapiens hypothetical |
| | | | protein FLJ20517 (FLJ20517) |
| Seq ID No. 86 | −2.641 | 0.00537 | Consensus includes gb: AV713720 /Homo sapiens |
| | | | mRNA for LST-1N protein |
| Seq ID No. 87 | −2.686 | 0.00479 | Consensus includes gb: AI057637 /Hs.234898 ESTs, |
| | | | Weakly similar to 2109260A B cell growth factor H. sapiens |
| Seq ID No. 88 | −2.654 | 0.00363 | Consensus includes gb: U90030.1 /DEF = Homo sapiens |
| | | | bicaudal-D (BICD) mRNA, alternatively spliced, partial cds. |
| Seq ID No. 89 | 2.695 | 0.00095 | gb: NM_001958.1 /DEF = Homo sapiens eukaryotic translation |
| | | | elongation factor 1 alpha 2 (EEF1A2) |
| Seq ID No. 90 | −2.758 | 0.00222 | Consensus includes gb: BF055311 /hypothetical protein |
| Seq ID No. 91 | 2.702 | 0.00084 | Consensus includes gb: AL133102.1 /DEF = Homo |
| | | | sapiens mRNA; cDNA DKFZp434C1722 |
| Seq ID No. 92 | −2.694 | 0.00518 | gb: AF114012.1 /DEF = Homo sapiens tumor necrosis |
| | | | factor-related death ligand-1beta mRNA |
| Seq ID No. 93 | 2.711 | 0.00049 | Consensus includes gb: AK001280.1 /DEF = Homo |
| | | | sapiens cDNA FLJ10418 fis, clone NT2RP1000130, |
| | | | moderately similar to HEPATOMA-DERIVED GROWTH FACTOR. |
| Seq ID No. 94 | −2.771 | 0.00156 | gb: NM_004659.1 /DEF = Homo sapiens matrix |
| | | | metalloproteinase 23A (MMP23A) |
| Seq ID No. 95 | 2.604 | 0.00285 | gb: BC006325.1 /DEF = Homo sapiens, G-2 and |
| | | | S-phase expressed 1 |
| Seq ID No. 96 | −3.495 | 0.00011 | gb: NM_022841.1 /DEF = Homo sapiens hypothetical |
| | | | protein FLJ12994 (FLJ12994) |
| Seq ID No. 97 | 3.224 | 0.00036 | Consensus includes gb: X16468.1 /DEF = Human |
| | | | mRNA for alpha-1 type II collagen. |
| Seq ID No. 98 | −3.225 | 0.00041 | gb: NM_005256.1 /DEF = Homo sapiens growth |
| | | | arrest-specific 2 (GAS2) |
| Seq ID No. 99 | −3.145 | 0.00057 | Consensus includes gb: AK021842.1 /DEF = Homo |
| | | | sapiens cDNA FLJ11780 fis, clone HEMBA1005931, |
| | | | weakly similar to ZINC FINGER PROTEIN 83. |
| Seq ID No. 100 | −3.055 | 0.00075 | Consensus includes gb: D89324 /DEF = Homo sapiens |
| | | | DNA for alpha (1,31,4) fucosyltransferase |
| Seq ID No. 101 | −3.037 | 0.00091 | gb: NM_017534.1 /DEF = Homo sapiens myosin, heavy |
| | | | polypeptide 2, skeletal muscle, adult (MYH2) |
| Seq ID No. 102 | −3.066 | 0.00072 | gb: U57059.1 /DEF = Homo sapiens Apo-2 ligand mRNA |
| Seq ID No. 103 | 3.060 | 0.00077 | gb: BC000596.1 /DEF = Homo sapiens, Similar to |
| | | | ribosomal protein L23a, clone MGC: 2597 |
| Seq ID No. 104 | −2.985 | 0.00081 | gb: NM_018558.1 /DEF = Homo sapiens gamma- |
| | | | aminobutyric acid (GABA) receptor, theta (GABRQ) |
| Seq ID No. 105 | −2.983 | 0.00104 | gb: NM_006437.2 /DEF = Homo sapiens ADP- |
| | | | ribosyltransferase (NAD+; poly (ADP-ribose) polymerase)- |
| | | | like 1 (ADPRTL1) |
| Seq ID No. 106 | −3.022 | 0.00095 | gb: NM_014042.1 /DEF = Homo sapiens DKFZP564M082 |
| | | | protein (DKFZP564M082) |
| Seq ID No. 107 | −3.054 | 0.00082 | gb: NM_030766.1 /DEF = Homo sapiens apoptosis |
| | | | regulator BCL-G (BCLG) |
| Seq ID No. 108 | −3.006 | 0.00098 | gb: BC001233.1 /DEF = Homo sapiens, Similar to |
| | | | KIAA0092 gene product, clone MGC: 4896 |
| Seq ID No. 109 | −2.917 | 0.00134 | Consensus includes gb: AL137162 /Contains a novel |
| | | | gene and the 5 part of a gene for a novel protein similar |
| | | | to X-linked ribosomal protein 4 (RPS4X) |
| Seq ID No. 110 | −2.924 | 0.00149 | gb: M55580.1 /DEF = Human spermidinespermine |
| | | | N1-acetyltransferase |
| Seq ID No. 111 | −2.882 | 0.00170 | Consensus includes gb: AB014607.1 /DEF = Homo |
| | | | sapiens mRNA for KIAA0707 protein |

The application's sequence listing, which the Patent Office published only in electronic form, follows.

SEQUENCE LISTING (111 sequences)

SEQ ID NO: 1 - DNA, 1044 bp, human
gccaggccccctcctgaaagaggctccttgaagataattctaacatctttgtcatcagtgttgacatctcttgattgtatcctgtcattccatttgagatcttcctggttctggctggcatcctctgacatcactccagcagaagaaagggaaggaacacgctgcattactgcgtgggatatcttctaaccatactgatgattctccgtatagctggtcttttccaccttatcatccttcctctgagaagtatgaaaacactaagacatgtcgagggccagatggagaactccatgccaacctgctttgccctgtggatgtgctggatgttcccgagggcaccttgcctgacaaacagagcactgagcaagccatacagttgttggaaaagatgaaaacgtcagccagtcctttcttcctggccgttgggtatcataagccacacatccccttcagataccccaaggaatttcagaagttgtatcccttggagaacatcaccctggcccccgatcccgaggtccctgatggcctaccccctgtggcctacaacccctggatggacatcaggcaacgggaagacgtccaagccttaaacatcagtgtgccgtatggtccaattcctgtggactttcagcggaaaatccgccagagctactttgcctctgtgtcatatttggatacacaggtcggccgcctcttgagtgctttggacgatcttcagctggccaacagcaccatcattgcatttacctcggatcatgggtgggctctaggtgaacatggagaatgggccaaatacagcaattttgatgttgctacccatgttcccctgatattctatgttcctggaaggacggcttcacttccggaggcaggcgagaagcttttcccttacctcgacccttttgattccgcctcacagttgatggagccaggcaggcaatccatggaccttgtggaacttgtgtctctttttcccacgctggctggacttgcaggactgcaggttccacctcgctgccccgttccttcatttcacgt

SEQ ID NO: 2 - DNA, 1152 bp, human
tctttttggcttgagcctgaggccttgtcgagaagcttccgtgaaagggtgggccagccgggccacgagaaagaaagtgaataaatcaggaatataagtgggcggggggcccctgagaggggggtcgcaaagggtgagacatggccaccaggcgtttaaccgacgctttcttgttgttgcggaataattccatccaaaaccggcagctgttagccgagcaagtgagtagtcacatcacctccagccctctgcattcacgtagcattgctgcggagctggacgagcttgctgatgaccgtatggcactggtgtcaggcatcagcttagatccagaagcagcgattggtgtgacaaaacggccacctcctaagtgggtggatggagtggatgaaattcagtatgatgttggccggattaagcagaagatgaaagaatcggccagccttcatgacaagcatttaaacagacccaccctggatgacagcagcgaagaggaacatgccattgagataactacccaagagatcactcagctcttccacaggtgccagcgtgccgtgcagccctgccgagccgggcccgggcctgctccgagcaggaggggcggctgcttgggaacgtggtgcctcgtggcgcaggccctgcaggaactctccaccagcttccggcacgcacaatcaggctacctcaaacgcatgaagaatcgagaggaaagatcccagcattttttcgacacatcagtaccactaatggatgatggagacgataacactctttaccatcggggttttacagaggaccagttagttctggtggagcagaacacactgatggtggaagagcgggaacgagagattcgccagatggtacagtccatttctgacctgaatgaaatattcagggacttaggggcgatgattgtagaacagggtacagtccttgacagaattgactataacgttgaacagtcctgtatcaaaactgaagatggtttgaaacagcttcacaaggcagaacagtatcaaaagaagaatcggaagatgcttgtgattttaatattatttgtcatcatcattgtgctcattgttgtcctcgttggcgtgaagtctcgataagtggcattgggttttcgtgtgtgccgcgcgtgtggat

SEQ ID NO: 3 - DNA, 7488 bp, human
atgagtgtgaaagaggcaggcagctcgggccgccgggagcaggcggcctaccacctgcacatctacccccagctgtccaccaccgagagccaggcctcgtgccgcgtgactgccaccaaggacagcaccacctcggacgtcatcaaggacgccattgccagcctgcggctggacggcaccaaatgttatgtgctggtggaggtcaaagagtcgggaggcgaggaatgggtgctggacgccaacgactcgcctgtgcaccgggtgctgctatggccccggcgggcacaggacgagcaccctcaggaggatggctactacttcctgctgcaggagcgcaacgcagatggaaccatcaagtacgtgcatatgcagctggtggcgcaggccacagccacccggcgcctagtggagcgtggcctcctgccacggcagcaggcggactttgatgacctgtgtaacctccccgagctaaccgagggcaacctcctgaagaacctcaagcaccgcttcctgcaacaaaagatctacacgtacgcggggagcatcctggtggccatcaacccctttaagttcctgcccatctacaaccccaagtacgtgaagatgtatgagaaccagcagctgggcaagctggagccacacgtcttcgcgctggccgacgtggcctactacaccatgctcaggaagcgcgtgaaccagtgcatcgtgatctcgggtgagagcggctccggcaagacccagagcaccaacttcctcatccactgcctcaccgccctcagccagaagggctacgccagcggcgtcgagaggaccatcctgggtgctggccctgtgctggaggcttttggaaatgccaagacagcccacaacaacaactccagccggtttgggaaattcatccaagtcagctacctagagagtggcatcgtgagaggagctgtcgtcgagaaatatctgcttgaaaagtctcgcctggtgtctcaggagaaggatgagaggaactaccatgtgttttattatttgttacttggggtcagcgaggaagagcgccaagaatttcagctcaagcagcctgaagattatttctacctcaaccagcataacttgaagattgaagatggggaggacctgaagcatgactttgagaggctcaagcaggccatggagatggtgggcttcctccccgccaccaagaagcagatttttgccgtcctctcggccatcctgtacctgggcaacgtcacttataagaagagagctacaggccgagaggaagggttggaggtcgggccacccgaggtgctggacaccctgtcgcagcttctgaaggtgaagcgagaaatcttggtggaggttctgaccaaaagaaaaacggtgaccgtcaacgacaagcttatccttccctacagcctcagcgaggccatcactgcccgcgactccatggccaagtctctgtacagcgccctgttcgactggattgtgctgcggatcaaccacgcactcctcaacaagaaggacgtggaagaggcagtctcgtgcctgtccattggggtcctggacatcttcgggtttgaagacttcgagaggaacagctttgagcagttctgcatcaactacgccaatgagcagctgcagtattacttcaaccagcacatcttcaagctggagcaggaggaatatcagggcgaggggatcacgtggcacaacatcggctacacagacaatgtcggctgcatccatctcatcagcaagaaacccacgggcctcttctacctgctggacgaggagagcaacttcccccacgccacgagccagaccctgctggccaagttcaaacagcaacatgaggacaataagtacttcctgggcaccccggtcatggagccagctttcatcatccagcacttcgcagggaaggtgaaatatcagatcaaggacttccgggagaagaacatggactacatgcggccagacatcgtggccctgctgcggggcagtgacagctcctacgtgcgggagctcatcggcatggaccccgtggccgtgttccgctgggccgtgctccgggctgctatccgggccatggcagtgcttcgggaggccggacgcctgcgggccgagagggccgaaaaggctgcaggtatgagcagccctggtgcccaaagtcacccagaagagctgccaagaggagccagcaccccttcggaaaaactttaccgcgatttgcataaccaaatgatcaagagcatcaaaggattgccctggcagggcgaggacccccgtagccttctccagtccctcagtcggctccagaaaccccgcgccttcatcctgaaaagtaaaggtatcaaacaaaagcagatcattccaaagaacctactggactccaagtccctgaaactcatcatcagcatgactctgcacgaccgcaccaccaagtccctactgcacctgcacaagaagaaaaagccaccaagcatcagcgcccagttccagacatcccttaacaagctcttggaggcactggggaaggcggagcccttctttatccgctgcatccgttccaatgctgaaaagaaagagctgtgctttgacgacgagctggtcctgcagcagctgcgctacaccggcatgctggagaccgtgcgcatccggaggtcagggtacagcgccaagtacacgttccaggatttcaccgagcagttccaggtgctcctgcccaaggatgcccagccctgcagggaggtcatctccaccctcctggagaaaatgaagatagacaagaggaactaccagatcgggaagaccaaggtcttcctgaaggagacggagcggcaagccctgcaggagacgctgcaccgggaggtggtgcggaaaatcctgctgctgcagagctggttccggatggtgctggagcgtcggcacttcctgcagatgaagcgggccgccgtcaccatccaggcctgctggcggtcctaccgggtccggagggcgctggagaggacgcaggctgccgtgtacctccaggcctcatggaggggctactggcagcggaagctctaccggcaccagaaacagagcatcatccgcctgcagagcctgtgtcgggggcacctgcagcgcaagagcttcagccagatgatctcggagaagcagaaggcagaagagaaggagagggaagccctggaagccgcaagagcaggtgctgaggagggcggacagggtcaggcggctggagggcagcaggtagctgagcaggggccggagccagcggaggatggcgggcacctggcatcggagcctgaggtgcagccaagtgacaggtcccccctagagcactcctcacctgagaaggaggccccaagcccagagaagactctcccaccccagaaaaccgtggcggctgaaagtcacgagaaagtccccagcagccgggagaagcgtgagtcgcgtcggcaaagagggctggagcacgtcaagttccagaacaaacacatccagtcctgcaaggaggagagtgccctcagagaaccttccagaagggtcacccaggagcaaggggtgagtctcctggaagacaaaaaggagagcagagaagatgaaacccttctagtcgtagagacggaggctgagaacacatctcaaaagcagcccacagagcaaccccaggccatggcagttggcaaggtctctgaagaaactgagaagacgctgcccagtgggagccccaggcctggccagttggagcggccgaccagcctggccctggacagcagggtcagcccaccggcccctggcagcgcccccgagacccccgaggacaagagcaaaccatgtggcagcccaagggttcaggaaaagcccgacagccccggaggctccacgcagatccagcggtacctggacgccgagcggctggccagcgccgtggaactgtggcggggcaagaagctggtggccgccgccagccctagtgccatgctcagccagtccctggacctcagcgacagacaccgggccacaggggccgccctcacgcccacagaggagaggcgcacctccttctccacgagcgacgtctccaagctcctcccgtccctggccaaggctcagcctgcagcagaaaccacggacggagagcgaagtgcgaaaaagccagctgtccagaagaagaagccaggcgacgcatcctccctcccagacgcagggctgtccccgggctctcaggtcgactctaaatccacgtttaagaggctttttctgcataaaaccaaggataaaaaatacagcctggagggcgcagaggagctggagaatgcagtgtccgggcacgtggtgctggaagccaccaccatgaagaagggcctggaagccccctccggacagcagcatcgccacgctgcaggtgagaagcgcaccaaggaaccaggaggcaaagggaagaagaaccgaaatgtcaagattgggaagatcacagtgtcagagaagtggcgggaatcggtgttccgccagatcaccaacgccaatgagctcaagtacctggacgagttcctgctcaacaagataaatgacctccgttcccagaagacgcccattgagagcttgtttatcgaagccaccgagaagttcaggagcaacatcaaaacgatgtactctgtcccgaacgggaagatccacgtgggctacaaggatctgatggagaactaccagatcgtcgtcagcaacctggccactgagcgtggccagaaggacaccaacctggtcctcaacctcttccagtcactgctagatgagttcacccgtggctacaccaagaacgacttcgagccagtgaagcagagcaaagctcagaagaagaagcggaagcaggagcgtgctgtccaggagcacaacgggcacgtgttcgccagctaccaggttagcatcccgcagtcgtgcgagcagtgcctctcctatatctggctcatggacaaggccctgctctgcagcgtgtgcaagatgacctgccacaagaagtgcgtgcacaagattcagagccactgctcctacacctacgggaggaagggcgagccaggcgttgagcctggccacttcggcgtgtgcgtagacagcctgaccagcgacaaggcctcggtgcccatcgtgctggagaagctcctggaacacgtggagatgcacggcctgtacaccgagggcctctaccgcaagtcgggtgctgccaaccgcactcgggagctccggcaggcgctgcagacagaccccgcagcagtcaagctggagaacttccccatccacgccatcacaggggtgctgaagcagtggctgcgggagctgcccgagcccctcatgaccttcgcacagtacggcgacttcctccgagccgtcgagctgccggagaagcaggagcagctggctgccatctatgccgtcctggagcaccttccagaagccaaccacaactccctggagagactcatcttccaccttgtcaaggtggccctgctcgaggatgtcaaccgcatgtcacctggggcgctggccattatcttcgcaccctgcctcctgcgctgccctgacaactcggacccgctgaccagcatgaaggacgtcctcaagatcaccacgtgcgtggagatgctgatcaaggagcagatgaggaaatacaaagtgaagatggaggagatcagccaactggaggctgcagagagtatcgccttccgcaggctttcgctcctgcgacaaaatgctccatggcctctcaaactggggttttcgtctccctatgagggggtcctgaacaagagccccaagacccgggacatccaggaggaggagctggaggtgctgctggaggaggaggcagccggcggcgatgaggaccgggaaaaggagattctcattgaacggatccagtccatcaaggaggagaaggaggacatcacctaccggctgccggagctggacccaaggggctcggacgaggagaacctggactcggagacgtcggccagcaccgagagcctgctggaggagcgggccgggcggggggcctcggaagggccccctgcgcctgctctcccttgccccggcgcgcccaccccgagccccctccccaccgtggccgcccctccacgacgaaggccgtcgtccttcgtaacggtcagagtgaagaccccccggcggacccccatcatgcccacggccaacatcaagctcccaccaggcctgccctcccacctgcctcgctgggcaccgggtgcccgggaggcggctgccccagtgcggcgccgggagccacctgcccgccgcccggaccagatacattccgtgtacatcacgcccggggcagacctgccagtgcagggcgccctggagcccctagaagaggatggccagccacctggggccaagcggaggtactcggatcccccaacgtactgcctgccccccgcctcgggccagaccaatggctgagagccacagctgacaaagtctgcatgtccgaggacggcccctgcactggagctgggcgccagagctgcagagctagtgttcggccctcagagaaggatccagaatcaaaagctcaagagtgacgtgaggtgggcaccggccccaagtgcagagtcaaggcagggagaggccggctggagccaggccccctcgcacgcagcccccaaatcatggacgcacctgtggggagcaccacatctccacctgcggcctcacatctccccactcccctttttgtacgtttaactgtttctttgtacgtggtttacgtaactttaaactgtaacagccttaatggaagaccaaatggttttttatatgtgtatgtacaaagttttctattaacgctgcccgtctcccttataacctggacgtgagctgtcagagcagaagccactaggccactgcgcgtctgaggctcagaccctgctgtggttggcttggggtggccaatgggctgggaccctccatgagagttttggacacttgggtcacctgacccgtgcctctctgacacatgtctccggggggcagccacctggccaatgtgcatttttgcacatgctggaaccttccatgggggtctgggctattggctggagccaggacatgagtcaggggcaccatggacctcacgtgccagggagacttgaatgtggctgtcactcttccggacgccaagggctgcaggaggctgcttttggcactacccaccccgtgtgacagaataggagccagcgactcaggactgctcacgggtcaggagggcaacgcctgaagtcagacctccctataggtcaacagggacaacctggggatctctggagcagggccctcctctctcaggcttggcccactcccccagacacctggacacgtggccacaaatctgggacaaggggcccccgcacagcatgaaataaaaagtgcctgagaagtgtgtgcaaaaaaaaaaaaaaaaaaaaaaaaaaaaaa

SEQ ID NO: 4 - DNA, 2172 bp, human
acagccgctccctcgctctgctggggcctccggacgcgcttcccacgcgggtctctggaacactcggtccgaacgcacgcctgcttgcactcacactgcggttcacacccgcaggcgctctcgcacccacactgccgctcacgcgcgctcacactcccccacgcgcgctccgctccggctccagccccgcgccccgcgaaggcgcaggcactgctgccgagagcgccgaggggccccgcggccttcccatggcggacctgagcttcatcgaagataccgtcgccttccccgagaaggaagaggatgaggaggaagaagaggagggtgtggagtggggctacgaggaaggtgttgagtggggtctggtgtttcctgatgctaatggggaataccagtctcctattaacctaaactcaagagaggctaggtatgacccctcgctgttggatgtccgcctctccccaaattatgtggtgtgccgagactgtgaagtcaccaatgatggacataccattcaggttatcctgaagtcaaaatcagttctttcgggaggaccattgcctcaagggcatgagtttgaactgtacgaagtgagatttcactggggaagagaaaaccagcgtggttctgagcacacggttaatttcaaagcttttcccatggagctccatctgatccactggaactccactctgtttggcagcattgatgaggctgtggggaagccgcacggaatcgccatcattgctctgtttgttcagataggaaaggaacatgttggcttgaaggctgtgactgaaatcctccaagatattcagtataaggggaagtccaaaacaataccttgctttaatcctaacactttattaccagaccctctgctgcgggattactgggtgtatgaaggctctctcaccatcccaccttgcagtgaaggtgtcacctggatattattccgataccctttaactatatcccagctacagatagaagaatttcgaaggctgaggacacatgttaagggggcagaacttgtggaaggctgtgatgggattttgggagacaactttcggcccactcagcctcttagtgacagagtcattagagctgcatttcagtagccaaagaggacaggaacaagtctgtcttcatgagggaggaagacaatggtcctataatgcccttggataagaaaaggaaacttttgagctgcaccttcagtttatcctcaaagcctgcgttgtttgtcttcatctaatccagctttgatggacatctgtgatggttgcctgtacacttgctgaaatgaaatattagaaatggctgtatattccaaagaaaccctatattatatatccacattactgctgctaggattcatagttgcacatactgtttattgcttatgtgtagaaggaatgaaactagtttccagagttgttattaatatgaatatatatcatgtgttaatattgagaaaggaaaaatacattcccggtgttagtagttcttcatttcctgtctccaacagaaaattcactcattttagaactagtgtaattcttgataataaaataagagttttgattaagaacagcatagagcttcaaaatgcaaagtgaatgattagtaaaattatgtctcattttattttttcagcacccataccacaattaatattaggctggattgccatgggaaacattttttggcattaatgcagcaacataatactcactttaggtattactacatagttgaaggatttaactgaatgtatggatcaaatttatttatttgacatattcgaagctgtggtttaataggaatttgagaaaggtgtaagaaataggataaaaagaaggtcagcaccatgtaccaggaatagctttactttccatacatagaaatataaatttagtggtatcctatattactttagtgtcgtacgctttgtaagacttaaatattttattctattgattccactactttggtatgttaagacatttctttaaagatgaccaacaatatccttattttaggtgccactagcagatgtaagcgtatacttagttgccgttagatgtgacagaatgagataatttatgtaaagcagtagagtacctggcacaaagcaaacaataaatattattgttattgttgttataa

SEQ ID NO: 5 - DNA, 3536 bp, human
ccgcccgtcccgccccgccccgccgcccgccgcccgccgagcccagcctccttgccgtcggggcgtccccaggccctgggtcggccgcggagccgatgcgcgcccgctgagcgccccagctgagcgcccccggcctgccatgaccgcgctccccggcccgctctggctcctgggcctggcgctatgcgcgctgggcgggggcggccccggcctgcgacccccgcccggctgtccccagcgacgtctgggcgcgcgcgagcgccgggacgtgcagcgcgagatcctggcggtgctcgggctgcctgggcggccccggccccgcgcgccacccgccgcctcccggctgcccgcgtccgcgccgctcttcatgctggacctgtaccacgccatggccggcgacgacgacgaggacggcgcgcccgcggagcggcgcctgggccgcgccgacctggtcatgagcttcgttaacatggtggagcgagaccgtgccctgggccaccaggagccccattggaaggagttccgctttgacctgacccagatcccggctggggaggcggtcacagctgcggagttccggatttacaaggtgcccagcatccacctgctcaacaggaccctccacgtcagcatgttccaggtggtccaggagcagtccaacagggagtctgacttgttctttttggatcttcagacgctccgagctggagacgagggctggctggtgctggatgtcacagcagccagtgactgctggttgctgaagcgtcacaaggacctgggactccgcctctatgtggagactgaggacgggcacagcgtggatcctggcctggccggcctgctgggtcaacgggccccacgctcccaacagcctttcgtggtcactttcttcagggccagtccgagtcccatccgcacccctcgggcagtgaggccactgaggaggaggcagccgaagaaaagcaacgagctgccgcaggccaaccgactcccagggatctttgatgacgtccacggctcccacggccggcaggtctgccgtcggcacgagctctacgtcagcttccaggacctcggctggctggactgggtcatcgctccccaaggctactcggcctattactgtgagggggagtgctccttcccactggactcctgcatgaatgccaccaaccacgccatcctgcagtccctggtgcacctgatgatgccagacgcagtccccaaggcgtgctgtgcacccaccaagctgagcgccacctctgtgctctactatgacagcagcaacaatgtcatcctgcgcaagcaccgcaacatggtggtcaaggcctgcggctgccactgagtccacccgcccggcccagctgcagccacccttctcatctggatcgggcccctcagaagcaggaaaccctcaaacccagccagaccccaggccggggcattgccagggaggaccctcacaaccacgtacatgaccctttctccttcatgccaggctcctatgctccccttgccctgccaggcatttgtgtgactgtcctgtttccagcccaggtggtctcaatcatcaggcagtgttctacccaaatgcaaacgcctctcccggaggcatgtcctggctggttctttggggttggcacagaagtcctgtctgaggtcctatccatgccccttactggctcaggtcgtgagatagatgtggaatgacctgagaggcacctggagcccactgttggccaccttgagctcttcaccatccatcacagggtgtggtgtgtgtagtcagggtctggttggctccccattgcctgcccgaggtgcaaggtggggtataaaactggataacccctgaagtattgtatattcatggatctgaagcactgatccactggtcacaggtagacatgtggagtcaactcaagaaaaagctgagtgaacagcatgatttagggctaaagccaatggcatttatcttcccttgtcttcctgctttgcatttgcctctgccatctaggaaagacatgtaagagcatggacattttactttggagaaacagaaaaatcttggggcttccaattgacccatctatctgccaccatgttgccccaccaggagctcagctctgtggagttttccctttgctgagcaagcatgtggttgcattgggtggcccaggatgacaatgcacagcacagatgccatcatttccctttcccctctgaatggcagacatcagtaatcaatctggaatgtttttcttccaaatctgagtggaattttcaaatgatcagcacagccactgccaacagatatgatgtaaagtgaaacctggttgccatcttctgccatgctgaggagcagtccatccctgcccgagcatgtatcggcaacatgggcagcctgtgaccgggtctggggcgaggccaggggccatcaaaaacaggctgatcaccaaagtcagtgtcaccctggatgcccagcagccctgtcctgtgtcttgggcctgtgagtcaaagaaaaggtccttttcagggagtgacaagtagtaattaggctgagttgggtggagaggtttgtctcagcctctgctgttctcggaaactgctgttctccttggagcagccactgggagttggagtgtttatttgatttctgacttgctaagcctgtaatttacctgctggaatagacagagtccagctgcccaaaccgtgtcattaaaagcagatcctgcgcccgccccatccacaggcacagcccggcagagtggttccacctccccatgggcccaaggatgcgcctctctggagttcacgtgctgcacccccagggaggggcctggggaaagctggtccagcagcaggggtggaggctggggccacactgcgggacagcagcccctccacctggaccagggagggcctccatgtgcaagcgcagaggaagagaccctcccatgtacgcaaagggcagccccaggctgtctggaagttggagaattccctatcagcacagggatctcagctctggcctggaggtgaagagacctgccttgtaggtggcttccttatctgcgcctccattttctatctgcactttttgatctccaaacaaccttcagccaaagaatctgtctaccaactcctcatagtgagccagaagcagcctcataaccctgaatgtggggctctggtggctgtcacgaagcagagttggcacataacatggaacctggccaggcatggtggctcacacctataaccccagcactttgggaggccaaggcaggcagatcacctgaagtcaggagttcaagaccatcctggccaacacagtgaaaccccatctgtactaaaaatacaagattacctgggcatggtggtgcatgcctataatcccagctactcaggaggctgaggcagaattgcttgaacctgggaggtggaggttgcagtgagcagagatcacaacattgcacttcagcctggtgacatgagcaaaactgttgtctcaacaaaatgaaattatg

SEQ ID NO: 6 - DNA, 3425 bp, human
agcgcctgtgctgccgcgtctcgacgtgtcaccggcggcgccgctgctgtggcaaaggaaggagctgactgggggagttcgaggcggcgggcggcggtgaccccggcctggaactgccccggtacggaagtgttccggggtccgtggggagcaggagagggaggcggcggaccgtcccgcgcggggcacgatgttgaacatgtggaaggtgcgcgagctggtggacaaagccaccaatgttgttatgaattattcagagatcgagtctaaggttcgagaggcaacgaacgatgatccttggggaccttctgggcaactcatgggagagattgccaaggctacatttatgtatgaacaatttccagaacttatgaacatgctttggtcacgaatgttaaaagacaacaaaaagaattggagaagagtttataagtcgttgctgctcctagcttacctcataaggaatggatcagagcgtgttgttacaagtgccagagaacacatttatgatttacgatccctggaaaattaccactttgtagatgagcatggtaaggatcaaggtataaatattcgacagaaggtgaaggaattggttgaatttgcccaggatgacgacaggcttcgtgaagagcgaaagaaagcaaagaagaacaaagacaagtatgttggggtttcctcagacagtgttggaggattcagatacagtgaaagatatgatcctgagcccaaatcaaaatgggatgaggagtgggataaaaacaagagtgcttttccattcagtgataaattaggtgagctgagtgataaaattggaagcacaattgatgacaccatcagcaagttccggaggaaagatagagaagactctccagaaagatgcagcgacagcgatgaggaaaagaaagcgagaagaggcagatctcccaaaggtgaattcaaagatgaagaggagactgtgacgacaaagcatattcatatcacacaggccacagagaccaccacaaccagacacaagcgcacagcaaatccttccaaaaccattgatcttggagcagcagcacattacacaggggacaaagcaagtccagatcagaatgcttcaacccacacacctcagtcttcagttaagacttcagtgcctagcagcaagtcatctggtgaccttgttgatctgtttgatggcaccagccagtcaacaggaggatcagctgatttattcggaggatttgctgactttggctcagctgctgcatcaggcagtttcccttcccaagtaacagcaacaagtgggaatggagactttggtgactggagtgccttcaaccaagccccatcaggccctgttgcttccagtggcgagttctttggcagtgcctcacagccagcggtagaacttgttagtggctcacaatcagctctaggcccacctcctgctgcctcaaattcttcagacctgtttgatcttatgggctcgtcccaggcaaccatgacatcttcccagagtatgaatttctctatgatgagcactaacactgtgggacttggtttgcctatgtcaagatcacagaatacagatatggtccagaaatcagtcagcaaaaccttgccctctacttggtctgaccccagtgtaaacatcagcctagacaacttactacctggtatgcagccttccaaaccccagcagccatcactgaatacaatgattcagcaacagaatatgcagcagcctatgaatgtgatgactcaaagttttggagctgtgaacctcagttctccatcgaacatgcttcctgtccggccccaaactaatgctttgatagggggacccatgcctatgagcatgcccaatgtgatgactggcaccatgggaatggcccctcttggaaatactccgatgatgaaccagagcatgatgggcatgaacatgaacatagggatgtccgctgctgggatgggcttgacaggcacaatgggaatgggcatgcccaacatagccatgacttctggaactgtgcaacccaagcaagatgcctttgcaaatttcgccaattttagcaaataagagattgtaaaagaagcagattgaatgaagaatttttagctgtgcagataggtgatgttgggatggaaaatgctaatcaactaccctttcttttatcaagtaattaaaataaatctacataaagaaccaaaaaggctgttttataaaagtgaaatatccagtatttcagagggccaggcaagagcacttcagatgaggcagtcaaaatcatttttttccagtgaggatagaccacaagtgggtggtgagaccattgaaagcctttatcaactgaagagtccatttaacagcataatttgtgggaagactggaatagggctgaataaatgtgtttgaatctctaattttatactttcttttcctgaggaacttgatttttctgtccctggatcgccttgtcataattgggtctgttccttttactaccactcttgagtccatatatgaaatcattaaagttggatgatcagttttttataaaaatatatatttttgtccaagaaaaaaaaaagcatacatatgtgattatggctaaatcaaaggtaactggaatgtatatacttttgctaatgttccagcaacactgctattatactatccaaatttttattgtaacaaaacctctttaagcaattggtgattgccatgggacttttcccatgtcttctgctgtaattatcctgtgcagaactaggaagaaatttttttcaggactgctctatggtttcctttaaaagaaaaaaacttctgtttgtttttagcagtcattatttacaatttgcagtgattaacttggcaaggcttccttccgtgtttatccctgtagccatcatttaagtcaggaacagtcagaaaaatatttattttattttttttttgggtgtctgcaaaggtaaaaatccattaaaaccttaagttaaatataaatgttacaactcaatgtttgcttttagattttatacagtatttgttttgttttggttttgagtgtatataatgcagcattagcaatatggttccaatagaggagttaaatatatattgttaaaggagacctgtagcagtcaaagattttattgatttaatgacaaaggaaattaatgaaaatgtttttgtttttctgctgtaattctgcattaagctcacatgaaaatcatgattctagagtttggaatgcaaaattaattgttttaccctcaagctgggaatatttttcaaaataaatactataatatagatatcaaattattacctccccatgttatgttgaaaatttttttattaaattgataaaactttatttccattatattcataatgttctgttatacataacattaaaatgttcattaaaatc

SEQ ID NO: 7 - DNA, 1767 bp, human
gcgcgccgctttctgttgccgggcgcaatggcggatacgctggagtcctcgctggaggacccactgcggagctttgtgcgagttttggagaagcgggatggtacagtgctacgactacagcagtatagctccggtggcgtgggttgcgttgtgtgggacgctgccattgtcctttctaaatacctggaaacgcccgagttttctggcgacggggcccacgcgctgagccggcggtcggtgctggagctgggttcgggcaccggggccgtggggctcatggctgctaccctcggggctgatgttgtagtcaccgatcttgaggaattgcaagacttgctgaagatgaatattaatatgaacaagcatcttgtcactggttctgttcaagccaaggggggaagaaatagaaggctttccttctccacccgacttcatactgatggccgactgcatatactatgaagagtctttggagccattgctgaaaactctaaaagatatcagcggatttgaaacttgtattatatgttgttatgaacaacgaacaatggggaaaaattcagaaattgagaaaaaatattttgagctccttcagctagattttgactttgaaaaaattcctttggaaaaacgtgatgaagagtatcgaagtgaagatattcatattatatacatcagaaagaaaaaatcgaaatttccatcgtgaagcctttaatcatcttacccaaggctctaacaacctgggtaaactaaagatgtgaatagagcatgtgaatacagcatgggaagattgtgttcacagatttttttttccggcacgtccttagagatccgatgtatagatgatgaccaccaggggctgtctgcaatacgaaaaattcctgcttgcctgcctgcctgccaatggccctgaatccagcttaggttacttagttcagcatcaagttcttcttaaatgttgggaatcagttattcaaataaaaattggtattgaggcgaggctgaaatctgccaaaaacagccaacatgatttgactggaccttttacaggaagctagagataaatttctgaagagaactatctgctattatataataatgttttaaattcaaactagtaaattttagtttgtcttcagagtttaaaaggttttcattttgtacataattatacaatatttatcatttgtattttccacttcatttcttttaaaatatctttaatactgaaatgttcttttaattttaaaaagaactgagatattgtcttgtatacttatattggccaaagttttcttttcctccaccatacatgtctatgtgatttaatcagtaaattgtactgtaatgagttgctaagaagacaaatcagaagattggaggaacaaaagatatctttacagatttttcatttgagcatggagtgagaatagaaagaccagtttcaggcttatgcacttacgtggctcatgcactttatgtatatgttccaggaaaatctggcttaaaaatactggtattgtttacatgaagcagtgaaaggtttttgaataactacaaatgtagttctatatgtatataccaaatgaatttctgttctgtgtctctctgttttatgttatgaagccattcgctcatatacaataatctgtcaaggactttaatcatacttgttccaaagagtagtaaccggatggaattctggtatttacaggcattggtgctagatggtacattttatgtgttaaaataaacattgtttttgag

SEQ ID NO: 8 - DNA, 2008 bp, human
cagcaactccgtggccaagctgaggaggcccagggcccgctcctgcttctccacgggtgtgctctgtggcccccgatggaagggggaaggatccaagcaggccctccctgcccagggcagaagattctggagtcctgggcgttgcctgtgagtgttctgagagataagggccccgcccgccccgccccgggaccaaggtcctcgtcccgtcccttgctgcgccgggaactcctgccccacgcaggcttctggtctccacactgggcttgttcctgggtgatgagattcggctccaccctcacgggctgccagcctcctgcccgatgggtgagcctctgctgctgcttcagcaaagggcggccccacttcccacactggcaggtggggacagggagaccctgggcctccccagagctcatgggttagcttccacaccctcatgctgtcatgagcctttctcacagggtcagaagagtctgcatctgacacagagaccccagtccacatagtcagggctgggccagagggagggacttggggctgatggggaggaggctcggcgtgagagtgaggtctttgcccaaggagggtatgaaagctggggctttagtgggtgggtaggagttggccagcagagagccgacggaagagttaatttaagtttatggacctgtaagtgctccgagtcccagggtgtctgggtgttagctgctgactggtgtcctcatgagtcgggctgggtgaggctgggttaggaagggttccacaagccccccgggtccactgaggtttgcccctgagatgatgaaccgaagcttttagagctgggcaggcgtgagggtgacccataactctctctgtcctgcctgcaggtcttgaggaccggcccagctcaggctcctggggcagcggcgaccagagcagctcctcctttgaccccagccgggtaggagtccccgtgaggcctgagaccctgagtttcctgtccccagagttgggggcgaggggtgtggggaaactgaggctgagagaaggggccagccttccaggggtttggactgggggacatgggtttgagtcctgcctctccagctgtaatgcggggtggagggggggcctgtgaagccccagcacctctcatccccaccccatctcccctagaccttcagcgagggcacccacttcactgagtcgcacagcagcctctcttcatccacattcctgggaccgggactcggaggtgagtgcctggcctggtgcggtccctctgctgtgcacagatgtgcagacgtgggccttggcatggtcagtgcacgcacagcgccaggcaagtccccagcgttcacccagagggtgtggacagccgaagcctctgcccgtcctgggagcagctgcggggaggtgcaggggacgtggcccggactccctggcacggcactctgcaactaggcttccccgcctgagcgtagaggcagggaggccgttccagaccccacttcctccctgggatttctgcagggctcctcctgcttcccggggaggggtcagccgggctggcctgtgcccgctgggaaggaggcgtaggagttctggagactcgggagggcggccagagtgtgcggtggtcagagcccatgcccttccgcagaccgcccgcccgccctctttccctggggggccctcctgttaaccgagagaatcgtgactcaggttgggctcggtggctcacgcctgtaataccagcactttgggagagcgaggtgggtggatcacctgaggtcaggagtttgagaccagcctggccaacatggtgaaaccccgcttctaccaaaaacacaaaaattagccggtcatggtgttggatgcttatagtgccaactactcaggaggctgaggcaggagaattgcttgaacccaggaggtggaggctgcagtgagccgagatcacgccattgccctccagcctgggtgatggagcgagattccatcttaaaaaaaaaaaaaaaaa

SEQ ID NO: 9 - DNA, 12533 bp, human
tccaaactgttcaaaatgatgaacgaagatgcagctcagaaaagcgacagtggagagaagttcaacggcagtagtcagaggagaaaaagacccaagaagtctgacagcaatgcaagcttcctccgtgctgccagagcaggcaacctggacaaagttgtggaatatctgaaggggggcatagacatcaatacctgcaatcagaatggactcaacgctctccatctggctgccaaggaaggccacgtggggctggtgcaggagctgctgggaagagggtcctctgtggattctgccactaagaagggaaataccgctcttcacattgcatctttggctggacaagcagaagttgtcaaagttcttgttaaggaaggagccaatattaatgcacagtctcagaatggctttactcctttatacatggctgcccaagagaatcacattgatgttgtaaaatatttgctggaaaatggagctaatcagagcactgctacagaggatggctttactcctctagctgtggcactccagcaaggacacaaccaggcggtggccatcctcttggagaatgacaccaaagggaaagtgaggctgccagctctgcatattgccgctaggaaagacgacaccaaatctgccgcacttctgcttcagaatgaccacaatgctgacgtacaatccaagatgatggtgaataggacaactgagagtggttttacccctttgcacatagctgcacattacggaaatgtcaacgtggcaactcttcttctaaaccggggagctgctgtggacttcacagccaggaatggaatcactcctctgcatgtggcttccaaaagaggaaatacaaacatggtgaagctcttactggatcgaggcggtcagatcgatgccaaaactagggatgggttgacaccacttcactgtgctgcacgaagtgggcatgaccaagtggtggaacttctgttggaacggggtgcccccttgctggcaaggactaagaatgggctgtctccactacacatggctgcccagggagaccacgtggaatgtgtgaagcacctgttacagcacaaggcacctgttgatgatgtcaccctagactacctgacagccctccacgttgctgcgcactgtggccactaccgtgtaaccaaactccttttagacaagagagccaatccgaacgccagagccctgaatggttttactccactgcacattgcctgcaagaaaaaccgcatcaaagtcatggaactgctggtgaaatatggggcttcaatccaagctataacagagtctggcctcacaccaatacatgtggctgccttcatgggccacttgaacattgtcctccttctgctgcagaacggagcctctccagatgtcactaacattcgtggtgagacggcactacacatggcagcccgagccgggcaggtggaagtggtccgatgcctcctgagaaatggtgcccttgttgatgccagagccagggaggaacagacacctttacatattgcctcccgcctgggtaagacagaaattgtccagctgcttctacaacatatggctcatccagatgcggccactacaaatgggtacacaccactgcacatctctgcccgggagggccaggtggatgtggcatcagtcctattggaagcaggagcagcccactccttagctaccaagaagggttttactcccctgcatgtagcagccaagtatggaagcctggatgtggcaaaacttctcttgcaacgccgtgctgccgcagattctgcagggaagaacggccttaccccgctccatgttgctgctcattatgacaaccagaaggtggcgctgctgttactggagaagggtgcttcccctcatgccactgccaagaatggctatactccgttacatattgctgccaagaagaatcaaatgcagatagcttccacactcctgaactatggagcagagacaaacattgtgacaaagcaaggagtaactccactccatctggcctcgcaggaggggcacacagatatggttaccttgcttctggataagggagccaatatccacatgtcaactaagagtggactcacatccttacaccttgcagcccaggaagataaagtgaatgttgctgatattctcaccaagcatggagctgatcaggatgctcatacaaagcttggttacacacctttaattgtggcctgtcactatggaaatgtgaaaatggtcaactttcttctgaagcagggagcaaatgttaacgcaaaaaccaagaacggctacacgcctttgcaccaggccgctcagcagggtcacacgcacatcatcaacgtcctgctccagcatggggccaagcccaacgccaccactgcgaatggcaacactgccttggcgattgctaagcgtctgggctacatctccgtggtcgacaccctgaaggttgtgactgaggaggtcaccaccaccaccacaactattacagaaaaacacaaactaaatgtacctgagacgatgactgaggttcttgatgtttctgatgaagagggtgatgacacaatgactggtgatgggggagaataccttaggcctgaggacctaaaagaactgggtgatgactcactacccagcagtcagttcctggatggtatgaattacctgcgatacagcttggagggaggacgatctgacagccttcgatccttcagttccgacaggtctcacactctgagccatgcctcctacctgagggacagtgccgtgatggatgactcagttgtgattcccagtcaccaggtgtcaactctagccaaggaggcagaaaggaattcttatcgcctaagctggggcactgagaacttagacaacgtggctctttcttctagtcctattcattcaggtttcctggttagttttatggtggatgcccgaggtggtgctatgcgaggatgcagacacaatgggctccgaatcattattccacctcggaaatgtactgctccaacgcgagtcacctgccgactggtcaagcgccacagactggcaacaatgcctccaatggtggaaggagaaggcctggccagtcgcctgatcgaagttggaccttctggtgctcagttccttggtaaacttcacctgccaacggctcctcccccacttaatgagggagaaagtttggtcagccgcattcttcagctggggcctcctggaaccaaattccttgggcctgtgatcgtggagatccctcactttgcggcccttcgaggaaaggaaagggaactggtggtcctgcgcagtgagaatggggacagctggaaagagcatttctgtgactacactgaagatgaattgaatgaaattcttaacggcatggatgaagtactggatagcccagaagacctagaaaagaaacgaatctgccgcatcatcacccgagacttcccacagtactttgcagtggtgtctcgtatcaaacaggacagcaatctgattggcccagaaggaggtgtactgagcagcacagtggtgccccaggtgcaggccgtcttcccagagggggcactcaccaagcggatccgtgtaggcctgcaggctcaacctatgcacagtgagctggttaagaagatcctaggcaacaaagctaccttcagccctatagtcactttggaacctagaagaagaaaattccacaaaccaattaccatgaccattcctgtccccaaagcttcaagtgatgtcatgttgaatggttttgggggagatgcaccaaccttaagattactatgcagcataacaggtggaaccacccctgcccagtgggaagatattacaggaactacgccattaacatttgtcaatgaatgtgtttcctttacaacaaacgtgtctgccaggttctggctgatagattgtcgacagatccaggaatccgttacttttgcatcacaagtatacagagaaattatctgcgtaccttatatggccaaatttgtagtgtttgccaaatcacatgaccccattgaagccaggttgaggtgtttctgcatgactgatgataaagtggataagacccttgaacaacaagaaaattttgctgaggtggccagaagcagggatgtggaggtgttagaaggaaaacccatctacgttgattgtttcggcaacttggtaccattaactaaaagtggccagcatcatatattcagtttttttgccttcaaagaaaatagacttcctctatttgtcaaggtacgcgatacgactcaggaaccttgcggacgactatcatttatgaaggagccaaaatccacgagaggcctggtgcatcaagctatttgcaacttaaacatcactttgccgatttatacaaaggaatcagagtcagatcaagaacaggaggaagagatcgatatgacatcagaaaaaaatgatgagacagaatctacagaaacatctgtcctgaaaagtcacctggttaatgaagttcctgtcctagcaagtccggacttgctctctgaagtttctgagatgaaacaagatttgatcaaaatgaccgccatcttgaccacagatgtgtctgataaggcaggttctattaaagtgaaggagctggtgaaggctgctgaggaagagccaggagagccttttgaaatcgttgaaagagttaaagaggacttagagaaagtgaatgaaatcctgagaagtggaacctgcacaagagatgaaagcagtgtgcagagctctcggtctgagagaggattagttgaagaggaatgggttattgtcagtgatgaggaaatagaagaggctaggcaaaaagcacctttagaaatcactgaatatccatgtgtagaagttagaatagataaagagatcaaaggaaaagtagagaaagactcaactgggctagtgaactaccttactgatgatctgaatacctgtgtgcctcttcccaaagagcagctgcagacagttcaagataaggcagggaagaaatgtgaggctctggctgttggcaggagctctgaaaaggaagggaaagacatacccccagatgagacacagagtacacagaaacagcacaaaccaagcttgggaataaagaagccagtaagaaggaaattaaaagaaaagcagaaacaaaaagaggaaggtttacaagctagtgcagagaaagctgaacttaaaaaaggtagttcagaagagtcattaggtgaagacccaggtttagcccctgaaccccttcccactgtcaaggccacatctcctttgatagaagaaactcccattggttccataaaggacaaagtaaaggcccttcagaagcgagtggaagatgaacagaaaggtcgaagcaagttgcccatcagagtcaaaggcaaggaggacgtgccaaaaaagaccacccacaggccacatccagctgcgtcaccctctctgaagtcagagagacatgcgccagggtctccctcccctaaaacagaaagacactctactctttcctcttccgcaaaaactgaaaggcaccctccagtatcaccatcaagtaaaactgagaaacactcacctgtgtcaccctctgcaaaaacggaaagacattcacctgcgtcatcatcgagtaaaactgagaaacactcacctgtatcaccctcgacaaaaactgaaaggcactctcctgtgtcatctacaaaaacagaaagacacccacctgtttcgccttcaggcaaaacagacaaacgtccacctgtatcgccctccgggaggacagaaaaacacccgccagtatcgcctgggagaacagaaaaacgcttgcctgtttcaccctccggaagaacggacaagcaccaacctgtatcaacagctgggaaaactgagaagcacctgcctgtgtcaccttctggcaaaacagaaaagcaaccacctgtatcccccacttcaaaaacagagaggattgaggaaaccatgtctgttcgggagctgatgaaggctttccagtcaggtcaggacccttctaaacataaaactggactctttgagcacaaatcagcaaaacaaaagcagccacaagagaaaggtaaagttcgggtagaaaaagaaaaggggccgatactaacccagagagaagctcagaaaacagagaatcagacaatcaaacgaggccagagactcccggtaacgggcacagcagaatccaaaagaggagttcgtgtttcctccataggagttaagaaagaagatgcagctggaggaaaggagaaagttctcagccacaaaatacctgaacctgttcagtcagtgcctgaagaagaaagccacagagagagcgaagtgcccaaagaaaagatggctgatgagcagggagacatggatctacagatcagcccagataggaaaacctccactgacttctctgaggtcattaagcaagagttggaagacaatgacaaataccaacaattccgcctgagtgaggagacagaaaaggcacagcttcacttagaccaagtactcactagtcctttcaacacaacatttccactcgactacatgaaagatgagttccttccagctctgtctttacaaagcggtgctttagatggcagttctgaaagcctaaagaatgagggggtagccggctctccgtgtggcagcctgatggaggggacccctcagattagttcagaagaaagctataagcatgaaggcctagcagagacccctgagacgagcccagaaagcctttctttctcaccaaagaaaagtgaggagcaaactggggaaacaaaggaaagcaccaagacagaaaccaccacagaaattcgttcagaaaaagagcatcccacgaccaaagacattactggtggctctgaagagcgaggtgccacagtcactgaggactcagagacctctactgagagttttcagaaagaggccactctaggctctcccaaagacacaagccctaaaagacaagatgattgcacaggcagctgtagtgtagcattagctaaagagacacctacaggactgactgaggaggcagcctgtgatgaaggtcaacgtacctttggtagttcagcccacaagacacaaactgatagtgaggctcaggaatccacagccacctcagacgagacaaaggccttgccgctgcctgaggcttctgtaaagacagatacaggaactgaatcaaaacctcagggagtcattagaagtccccaagggttagaacttgcactccctagccgagatagcgaagtcctcagcgctgtggctgatgactcattagcagtgagccacaaagactctctggaagccagccctgtgctagaagataactcttcacacaaaacccctgattctctggagccaagtcctctgaaagaatccccttgccgtgactctctggaaagcagccctgttgaaccaaagatgaaggctggaatttttccaagtcactttcctcttcctgcagctgttgccaaaacagaactcttgacggaagtggcctctgtgcggtcccggctactccgagaccctgatggcagtgctgaggatgacagtcttgagcagacatcgctcatggagagctcagggaagagccccctttctcctgacacccccagctctgaagaagtcagctatgaggttacacccaaaaccacagatgtaagtacaccaaaaccagctgtgattcatgaatgtgcagaggaggatgattcagaaaacggggagaaaaagaggttcacacctgaagaggagatgtttaaaatggtaaccaaaatcaaaatgtttgatgaacttgaacaagaagcaaagcagaaaagggactacaaaaaagaacccaaacaagaagaatcttcttcatcttctgacccagatgctgactgttcagtagatgtggatgaaccaaaacatacaggcagtggggaggatgaaagtggtgtccctgtgttagtaacttcggagagcaggaaggtgtcttcctcctcagaaagtgaacctgagttggcacagcttaaaaaaggtgctgactcaggccttttaccagaaccagtgattcgagtacaacctccttctccacttccatcaagcatggactccaattccagtccagaagaagtacaattccagcctgtcgtttccaaacaatatactttcaagatgaatgaagatactcaggaagagccaggcaaatcagaagaagaaaaagattctgaatcccatttagctgaagaccgtcatgctgtttccactgaggctgaagacaggtcttatgataagctaaacagagacactgatcagccaaaaatctgtgatggccatggatgtgaggccatgagtcctagcagctcagctcgtcctgtctcttcaggtctacagagtccgactggtgatgatgttgatgaacagccagtcatctataaagaatcattagctctccaaggcactcatgaaaaagacacagagggagaagagcttgatgtttctagagcagaatctccacaagcagattgccccagtgaaagcttttcatcttcatcctctttgcctcattgtttggtatctgaaggaaaagaattagatgaagacatatctgccacatcttctattcaaaaaacagaggtcacaaaaactgatgaaacatttgagaacttaccaaaggactgcccctctcaagactcatccattactactcaaacagatagattttccatggatgttcccgtgtctgacctagctgagaatgatgaaatctatgatccacaaatcactagcccttatgaaaatgtcccttcccaatcttttttctctagtgaagaaagcaaaacccaaacagatgcaaatcacaccacaagttttcactcttctgaagtgtattctgttaccatcacatcccctgttgaagacgttgtagtggcaagctcctctagtggaactgttttaagcaaagaatctaattttgagggccaggacataaaaatggaatcccaactggaaagtaccttgtgggaaatgcaatcagacagtgtctcttcatctttcgagcctactatgtccgctacaacaacagttgttggtgaacaaataagcaaagtcatcatcacaaaaactgatgtggattctgattcttggagtgaaattcgggaagacgatgaagcctttgaggctcgtgtgaaagaggaagaacaaaagatatttggtttgatggtagacagacaatcacagggtaccacccctgacaccactcctgctaggaccccaactgaagaggggaccccaacaagtgagcaaaacccatttctgtttcaggaaggaaaattgtttgaaatgacccgaagtggtgccattgatatgaccaaaaggtcctatgcagatgaaagttttcactttttccaaattggtcaagaatccagggaagagactctctctgaagatgtgaaagaaggggctactggggctgatcccctaccgctggagacatcagctgaatcactagcactttcagaatcaaaagaaacagtggatgatgaggcagacttacttccagatagcgtgagtgaggaagtagaggaaatacctgcttcggatgctcaacttaactcccaaatggggatttcagcctccactgaaacacctacaaaagaggctgttagtgtagggaccaaggacctccccaccgtgcaaacgggtgatatacctcctctctctggtgtaaagcagatatcctgccccgactcttctgaaccagctgtacaagtccagttagatttttccacactcaccaggtctgtttattcagataggggtgatgattctcccgattcttccccagaagaacagaaatcagtaatcgagattcctactgcacccatggagaatgtgccttttactgaaagcaaatccaaaattcctgtaaggactatgcccacttccaccccagcacctccatctgcagagtatgagagttcagtttctgaagattttctatccagtgtagatgaggaaaataaggcggatgaagcaaaaccaaagtccaaactccctgtcaaagtacccctccaaagagttgaacagcagctctcagatctagacacctctgtccagaagacagtggctcctcagggacaggacatggcaagcatcgcaccagataatagaagcaaatctgaatctgatgctagttctttggattcaaagaccaaatgcccagtaaaaacccgaagttacactgagacagaaacagagagcagagagagggccgaggaacttgagttagaatcagaagaaggggccacaagaccaaagatacttacatcccgattgccagttaagagcagaagcactacatcttcctgcagggggggcacgagccccacaaaagaaagtaaggagcatttctttgacctttacagaaattccatagaattctttgaggagattagtgatgaggcttccaaattagtggataggctgacacagtcagagagggagcaggaaatagtttcagacgatgaaagtagtagtgccctggaagtatcagtaattgaaaatctgccacctgttgagaccgagcactcagttcctgaggacatctttgacacaaggcccatttgggatgagtctattgagactctgattgaacgcatccctgatgaaaatggccatgaccatgctgaagacccacaggatgagcaggaacggatcgaggaaaggctggcttatattgctgatcaccttggcttcagctggacagaattagcaagagaactggatttcactgaggagcaaattcatcaaattcgaattgaaaatcccaactctcttcaagaccagagtcatgcactgttgaagtactggctagagagggatgggaaacatgctacagataccaacctcgttgaatgtctcaccaagatcaaccgaatggatattgttcatctcatggagaccaacacagaacctctccaggagcgcatcagtcatagttatgcagaaattgaacagaccattacactggatcatagtgaagggttctcggtacttcaagaggagttatgcactgcacagcacaagcagaaagaggagcaagctgtttctaaagaaagtgagacctgcgatcaccctcctatcgtctcagaggaagacatttctgttggttattccacttttcaggatggcgtccccaaaactgagggggacagctcatcaacagcactctttccccaaactcacaaggagcaagttcaacaggatttctcagggaaaatgcaagacctgcctgaagagtcatctctggaatatcagcaggaatattttgtgacaactccaggaacagaaacatcagagactcagaaggctatgatagtacccagctctcccagcaagacacctgaggaagttagcacccctgcagaggaggagaagctgtacctccagaccccaacatccagcgagcggggaggctctcccatcatacaagaacccgaagagccctcagagcacagagaggagagctctccgcggaaaaccagcctcgtaatagtggagtctgccgataaccagcctgagacctgtgaaagactcgatgaagatgcagcttttgaaaagggagacgatatgcctgaaatacccccagaaacagtcacagaagaagaatacattgatgagcatggacacaccgtggtaaagaaggttactaggaaaatcattaggcggtatgtatcctctgaaggcacagagaaagaagagattatggtgcagggaatgccacaggaacctgtcaacatcgaggaaggggatggctattccaaagttataaagcgtgttgtattgaagagtgacaccgagcagtcagaggacaacaatgagtaaagccatcacacagaagagggctgtggtgaaggaccagcatggaaaacgcattgacttggagcacctggaggatgtaccagaagcactagaccaggacgacctccagcgcgatctccagcagctccttcggcatttctgcaaggaggacttgaagcaagaggccaagtgagggactgcccagttctcacaccagaaaccacacattcactcaatatgcagcttcctgtttcagtaggggagtgacctaactggcctaattaatgggataccccgacatttccactgttagcaaatatacggcattttgctttagttttcccccatcctctttaactataaagctaatttgtgaccaaagatggcatccttcatactggatgctgtatccaatactttgttgtgtctgtgctaacctgggaactggccacctccattgttctttgcttctgcacaagatccatgaaaatccattgatcagaagaacttcacctgcagacctcttcaagtgacactatgtaggaatccttccaaggaatatctatgtacaatgtatatagctgaaatgctcagatgaacaacatattaaaattaaaaccactgcctattgtaactacactgggcatcagaataaaaggcctctaaaa

SEQ ID NO: 10 - DNA, 3071 bp, human
atggccggcgcccccggcccgctgcgccttgcgctgctgctgctcgggatggtgggcagggccggcccccgcccccagggtgccactgtgtccctctgggagacggtgcagaaatggcgagaataccgacgccagtgccagcgctccctgactgaggatccacctcctgccacagacttgttctgcaaccggaccttcgatgaatacgcctgctggccagatggggagccaggctcgttcgtgaatgtcagctgcccctggtacctgccctgggccagcagtgtgccgcagggccacgtgtaccggttctgcacagctgaaggcctctggctgcagaaggacaactccagcctgccctggagggacttgtcggagtgcgaggagtccaagcgaggggagagaagctccccggaggagcagctcctgttcctctacatcatctacacggtgggctacgcactctccttctctgctctggttatcgcctctgcgatcctcctcggcttcagacacctgcactgcaccaggaactacatccacctgaacctgtttgcatccttcatcctgcgagcattgtccgtcttcatcaaggacgcagccctgaagtggatgtatagcacagccgcccagcagcaccagtgggatgggctcctctcctaccaggactctctgagctgccgcctggtgtttctgctcatgcagtactgtgtggcggccaattactactggctcttggtggagggcgtgtacctgtacacactgctggccttctcggtcttctctgagcaatggatcttcaggctctacgtgagcataggctggggtgttcccctgctgtttgttgtcccctggggcattgtcaagtacctctatgaggacgagggctgctggaccaggaactccaacatgaactactggctcattatccggctgcccattctctttggcattggggtgaacttcctcatctttgttcgggtcatctgcatcgtggtatccaaactgaaggccaatctcatgtgcaagacagacatcaaatgcagacttgccaagtccacgctgacactcatccccctgctggggactcatgaggtcatctttgcctttgtgatggacgagcacgcccgggggaccctgcgcttcatcaagctgtttacagagctctccttcacctccttccaggggctgatggtggccatcttatactgctttgtcaacaatgaggtccagctggaatttcggaagagctgggagcgctggcggcttgagcacttgcacatccagagggacagcagcatgaagcccctcaagtgtcccaccagcagcctgagcagtggagccacggcgggcagcagcatgtacacagccacttgccaggcctcctgcagctgagactccagcgcctgccctccctggggtccttgctgcaggccgggtggccaatccaggtgggagagacactcccagggacaagggaaggaagggacacacacacacacacacacacacacacacacacatacatcctgctttccctccccaaacccatcagacaggtaaatgggcagtgcctcctgggaccatggacacattttctcctaggagaagcagcctcctaatttgatcacagtggcgagaggagaggaaaaacgatcgctgtgaaaatgaggaggattgcttcttgtgaaaccacaggcccttggggttcccccagacagagccgcaaatcaaccccagactcaaactcaaggtcaacggcttattagtgaaactggggcttgcaagaggaggtggttctgaaagtggctcttctaacctcagccaaacacagagcgggagtgacgggagcctcctctgcttgcatcacttggggtcaccaccctcccctgtcttctctcaaagggaagctgtttgtgtgtctgggttgcttatttccctcatcttgccccctcatctcactgcccagtttctttttgaggggctttgtttgggccactgccagcagctgtttctggaaatggctgtaggtggtgttgagaaagaatgagcattgagacggtgctcgcttctcctccaggtatttgagttgttttggtgcctgcctctgccatgcccagagaatcagggcaggcttgccaccggggaacccagccctggggtatgagctgccaagtctattttaaagacgctcaagaatcctctggggttcatctagggacacgttaggaatgtccagactgtgggtgtagattacctgccacttccaggagcccagagggccaagagagacattgcctccacctctccttggaaatactttatctgtgaccacacgctgtctcttgagaatttggatacactctctagctttaggggaccatgaagagactctcttagggaaaccaatagtccccatcagcaccatggaggcaggctccccctgcctttgaaattcccccacttgggagcttgtatatacttcactcacttttctttattgctgtgaatagtctgtgtgcacaatgggcaattctgacttctcccatctagtggaaatgagcgaaatcatggttgtagtgatgttgtttgggagagtgcagtagtaattgatttgacccactcacacttggagctaattaaggtttgccctgcctgcagcctcccccacaaataatgaacagcagaaagactggacggggaaacctatcaatcctgcccccagccatggtgaggaagccccaagccatggtgacacacagcagcactgcagatagccagacacatggctatcctagagaggctggcaaggagttcgtggctgcaaaagaagtttctggagcaagagagagctcgctcttgggagtcaggacctccggggagagcagagggttccgacggattcctttatgagtcagtctctctctcccttttaaatggtgggaaccctccccaaaacctttccccagacacattctcctgtgcccctcagagaggcatgtgatgtgcaaggaaaataataggatgtaaaacacatcaagtagaaaatttcttatacttccaaaaaaaaaagc

SEQ ID NO: 11 - DNA, 3088 bp, human
cgcgccagggaggttgtcgggaggggccggcgaataaaacgagcggcgaaagaaccgaaaaaaggctcgacgctaccgtgtatgaggaactttgatccttgcgggccaccattccggaagtagaatttagaggaagaaaataccggagttgcagggtataggtaaatttctcaaggttataggttggggttcttagaactttttgtggtgtgtgttggcctagagcgactcagaagcgttagtgacttcacctaaaaaagctaacctctctgctgagcgcgaccggtatgcggcgcaggatgagcctcagggcttctgttaagagtctgtctgagaaagccggtctgcgctgttcctcggtggcgaccttaattatgagatgagctaatgctttactgacttaaccatggcgcagcgggcagtgtggctcataagccacgaaccgggaactccactttgtggcaccgtgagattctccagacggtatccaactgttgaaaaacgagccagagtcttcaatggagcaagttatgtgcctgttcctgaagatggtccctttcttaaagcactgctctttgaacttagattattggatgatgataaagacttcgttgagagtcgtgatagctgttcacgcatcaataaaacatccatttatggactcctgataggaggtgaagaactctggccagttgttgcttttctgaagaatgacatgatatatgcttgtgttccactagttgaacaaactctgtcccctcgtccgccactaattagtgtcagtggagtttcacaaggctttgaatttctttttgggatacaggattttctttattcaggtcaaaaaaatgactctgagctgaatacaaaattgagccagttgcctgacttgcttctgcaggcttgtccatttggtactttattagatgccaacttacagaattcattagataataccaattttgcatctgtgactcagccacagaaacagccagcttggaaaactgggacgtacaaaggaaaaccacaagtttctatttctatcactgaaaaggtaaaatccatgcaatatgataaacagggtatagcagatacatggcaagttgttggaacagtgacttgcaagtgtgatttggaaggaatcatgccaaatgttaccatcagcttgagtctccccaccaatggatctccacttcaggatattctagttcacccttgtgtaacttctcttgactctgcaattctgacttctagtagtattgatgcaatggatgactctgcatttagtgggccttacaaatttccattcactccacctttagagtcattcaacttatgcttctacacttcccaggtccctgccccaccaattttgggtttttatcaaatgaaggaggaagaagtacaactaagaataaccattaatttaaaacttcatgaaagtgtgaaaaataattttgaattctgtgaagcccatatacctttttacaatagaggtccaattacacatttggaatacaaaactagttttggccagcttgaagtatttcgagagaaaagcttattgatctggattattggccagaagttcccaaaatcaatggaaattagtctttctggaactgtaacttttggagccaagagccatgagaagcagccatttgacccaatttgtactggagaaacagcatatttaaagcttcattttaggatcttagattacacacttactggatgttatgcagatcagcattcagttcaagtttttgcatcaggaaaaccaaaaataagtgcacaccggaaactaatttcttctgattattacatctggaattctaaagcccctgctccagtaacatatggatcattattattgtaatagtctcatgtttaaatgggattatataatgataacagtttaaagaaaatcataatcttatatttttaatgtggatgcatataacctgtgagtgaaaaatcactgaatgatttaattgtaaaagtagtcttatgtggtgtttgtagtctgatagagcttgaaaggacattttaaaagctaatgtctccaattttgtcaaccttcgattttatgccagtataattcagaacatagaaaagtaatgattcacttgggctcattttagactggtcctgggtcaccctgccacacttgtttcctagtgtttctgtggcagacattgctaatcaattacagcccttttctgtactgagccttggataaagggtcaggctcctttttagttcagagattcaggcagccactcccagtgggttgtagataatgtgcaagataaaaactattttctcttccaaatctaagtactaagctcctagtataaggtgttgttacagaataccagagaccatgttagagacaactacatctcttcaaaaaacagccaacagagacaaaggaaaagtgtttaaatagtaagctgttcttcttaatcagaactatcctattgactaataaataatctgcataattctacttaaggtgtgtaatctctgttctagagttagtttttaagtaagcttgttaatctgccactttgacattttgcttaggatgtcagtagccatattaagatgtgtagaataccttcagaagatgatcatagtgttttgtaatcatttaatgtctgcagccaaatttttaaaggtaatttagacctaatactgctcttgctgtgtcttattaagttaaaattaatgaatgaattctggtaaaaattcaaaaggcactctgtgagtagagagtatcatttaagcttattttagtcacatgtagtatatatctccttaaagctgtcactctcactttcttaccattctcttgatttcttcagaaaccatctagtcatcatctttatactctacctgcttctgcaattatatatcatattatgttttcagagcagttcattgtcaagttggactttaagtgaccattcaagaaaagatgaaatctcacgaacctcaaaacttcattcatgtctttttacaaatgagaaaaaaaaatgcattaaagattaatactcaatttgaaaaaaaaaaaaaaaaaaaa

SEQ ID NO: 12 - DNA, 2584 bp, human
gggggcgtggccccgagaaggcggagacaagatggccgcccatagcgcttggaggacctaagaggcggtggccggggccacgccccgggcaggagggccgctctgtgcgcgcccgctctatgatgcttgcgcgcgtcccccgcgcgccgcgctgcgggcggggcgggtctccgggattccaagggctcggttacggaagaagcgcagcgccggctggggagggggctggatgcgcgcgcacccggggggaggccgctgctgcccggagcaggaggagggggagagtgcggcgggcggcagcggcgctggcggcgactccgccatagagcaggggggccagggcagcgcgctcgccccgtccccggtgagcggcgtgcgcagggaaggcgctcggggcggcggccgtggccgggggcggtggaagcaggcgggccggggcggcggcgtctgtggccgtggccggggccggggccgtggccggggacggggacggggccggggccggggccgcggccgtcccccgagtggcggcagcggccttggcggcgacggcggcggctgcggcggcggcggcagcggtggcggcggcgccccccggcgggagccggtccctttcccgtcggggagcgcggggccggggcccaggggaccccgggccacggagagcgggaagaggatggattgcccggccctcccccccggatggaagaaggaggaagtgatccgaaaatctgggctaagtgctggcaagagcgatgtctactacttcagtccaagtggtaagaagttcagaagcaagcctcagttggcaaggtacctgggaaatactgttgatctcagcagttttgacttcagaactggaaagatgatgcctagtaaattacagaagaacaaacagagactgcgaaacgatcctctcaatcaaaataagggtaaaccagacttgaatacaacattgccaattagacaaacagcatcaattttcaaacaaccggtaaccaaagtcacaaatcatcctagtaataaagtgaaatcagacccacaacgaatgaatgaacagccacgtcagcttttctgggagaagaggctacaaggacttagtgcatcagatgtaacagaacaaattataaaaaccatggaactacccaaaggtcttcaaggagttggtccaggtagcaatgatgagacccttttatctgctgttgccagtgctttgcacacaagctctgcgccaatcacagggcaagtctccgctgctgtggaaaagaaccctgctgtttggcttaacacatctcaacccctctgcaaagcttttattgtcacagatgaagacatcaggaaacaggaagagcgagtacagcaagtacgcaagaaattggaagaagcactgatggcagacatcttgtcgcgagctgctgatacagaagagatggatattgaaatggacagtggagatgaagcctaagaatatgatcaggtaactttcgaccgactttccccaagagaaaattcctagaaattgaacaaaaatgtttccactggcttttgcctgtaagaaaaaaaatgtacccgagcacatagagctttttaatagcactaaccaatgcctttttagatgtatttttgatgtatatatctattattcaaaaaatcatgtttattttgagtcctaggacttaaaattagtcttttgtaatatcaagcaggaccctaagatgaagctgagcttttgatgccaggtgcaatctactggaaatgtagcacttacgtaaaacatttgtttcccccacagttttaataagaacagatcaggaattctaaataaatttcccagttaaagattattgtgacttcactgtatataaacatatttttatactttattgaaaggggacacctgtacattcttccatcatcactgtaaagacaaataaatgattatattcacagactgattggaattctttctgttgaaaagcacacacaataaagaacccctcgttagccttcctctgatttacattcaactctgatccctgggccttaggtttgacatggaggtggaggaagatagcgcatatatttgcagtatgaactattgcctctggacgttgtgagaattgtgctttcaccagaatttctaagaatttctgctaaatatcacctagcatgtgtaattttttttccttgcctgtgacttggacttttgatagttctataagaataaggctttttcttcccttgggcatgagtcagatacacaaggacccttcaggtgttactagaaggcgtccatgtttattgttttttaaagaatgtttggcactctctaacgtccactagcttactgagttatcaggtgcaggtcagactcttggctacagtgagaggcagcttctaggcagagttgcttaatgaaagggtttgtaatactttacaaaccattacctgtacctggcctggcctccaaaatattaacattctttttctgttgaaactcgcgagtgtaactttcataccacttgaatttattgatatttaattatgaaaactagcattacattattaaacgatttctaaaatc

SEQ ID NO: 13 - DNA, 2935 bp, human
ccgcaactcgctcggccgccgccatcttgcgagctcgtcgtactgaccgagcggggaggctgtcttgaggcggcaccgctcaccgacaccgaggcggactggcagccctgagcgtcgcagtcatgccggccggacccgtgcaggcggtgcccccgccgccgcccgtgcccacggagcccaaacagcccacagaagaagaagcatcttcaaaggaggattctgcaccttctaagccagttgtggggattatttaccctcctccagaggtcagaaatattgttgacaagactgccagctttgtggccagaaacgggcctgaatttgaagctaggatccgacagaacgagatcaacaaccccaagttcaactttctgaaccccaatgacccttaccatgcctactaccgccacaaggtcagcgagttcaaggaagggaaggctcaggagccgtccgccgccatccccaaggtcatgcagcagcagcagcagaccacccagcagcagctgccccagaaggtccaagcccaagtaatccaagagaccatcgtgcccaaagagcctcctcctgagtttgagttcattgctgatcctccctctatctcagccttcgacttggatgtggtgaagctgacggctcagtttgtggccaggaatgggcgccagtttctgacccagctgatgcagaaagagcagcgcaactaccagtttgactttctccgcccacagcacagcctcttcaactacttcacgaagctagtggaacagtacaccaagatcttgattccacccaaaggtttattttcaaagctcaagaaagaggctgaaaacccccgagaagttttggatcaggtgtgttaccgagtggaatgggccaaattccaggaacgtgagaggaagaaggaagaagaggagaaggagaaggagcgggtggcctatgctcagatcgactggcatgattttgtggtggtggaaacagtggacttccaacccaatgagcaagggaacttccctccccccaccacgccagaggagctgggggcccgaatcctcattcaggagcgctatgaaaagtttggggagagtgaggaagttgagatggaggtcgagtctgatgaggaggatgacaaacaggagaaggcggaggagcctccttcccagctggaccaggacacccaagtacaagatatggatgagggttcagatgatgaagaagaagggcagaaagtgcccccacccccagagacacccatgcctccacctctgcccccaactccagaccaagtcattgtccgcaaggattatgatcccaaagcctccaagcccttgcctccagcccctgctccagatgagtatcttgtgtcccccattactggggagaagatccccgccagcaaaatgcaggaacacatgcgcattggacttcttgaccctcgctggctggagcagcgggatcgctccatccgtgagaagcagagcgatgatgaggtgtacgcaccaggtctggatattgagagcagcttgaagcagttggctgagcggcgtactgacatcttcggtgtagaggaaacagccattggtaagaagatcggtgaggaggagatccagaagccagaggaaaaggtgacctgggatggccactcaggcagcatggcccggacccagcaggctgcccaggccaacatcaccctccaggagcagattgaggccattcacaaggccaaaggcctggtgccagaggatgacactaaagagaagattggccccagcaagcccaatgaaatccctcaacagccaccgccaccatcttcagccaccaacatccccagctcggctccacccatcacttcagtgccccgaccacccacaatgccacctccagttcgtactacagttgtctccgcagtacccgtcatgccccggcccccaatggcatctgtggtccggctgcccccaggctcagtgatcgcccccatgccgcccatcatccacgcgcccagaatcaacgtggtgcccatgcctccctcggcccctcctattatggccccccgcccaccccccatgattgtgccaacagcctttgtgcctgctccacctgtggcacctgtcccagctccagccccaatgccccctgtgcatcccccacctcccatggaagatgagcccacctccaaaaaactgaagacagaggacagcctcatgccagaggaggagttcctgcgcagaaacaagggtccagtgtccatcaaagtccaggtgcccaacatgcaggataagacggaatggaaactgaatgggcaggtgctggtcttcaccctcccactcacggaccaggtctctgtcattaaggtgaagattcatgaagccacaggcatgcctgcagggaaacagaagctacagtatgagggtatcttcatcaaagattccaactcactggcttactacaacatggccaatggcgcagtcatccacctggccctcaaggagagaggcgggaggaagaagtagacaagaggaacctgctgtcaagtccctgccattttgcctctcctgtctcccaccccctgccccagacccaggagcccccctgaggctttgccttgcctgcatatttgtttcgctcttactcagtttgggaattcaaattgtcctgcagaggttcattcccctgaccctttccccacattggtaagagtagctgggttttctaagccactctctggaatctctttgtgttagggtctcgatttgaggacattcatttcttcagcagcccattagcaactgagagcccagggatgtcctacaggatagtttcatagtgacaggtggcacttggctaatagaatatggctgatattgtcattaatcattttgtaccttgacatgggttgtctaataaaactcggacccttcttgtgaaaaaaaaaaaaaaaaaa

SEQ ID NO: 14 - DNA, 462 bp, human
atggcgcgtactaagcagacggctcgtaaatccacaggcggtaaagcaccgcgcaaacagctggccactaaggcagctcgcaagagcgctccggccacgggcggcgtgaagaagccccatcgctaccgccctggcaccgtggctctgcgcgagatccgtcgctaccagaagtctaccgagcttctaatccggaagctgccgtttcagcgcctggtgcgagaaatagctcaggacttcaagaccgacctgcgcttccagagttccgcggtgatggcgctgcaggaggcctgcgaggcctacttggtggggcttttcgaggacaccaacctgtgcgctattcatgccaaacgcgtgaccatcatgcctaaagacatccagcttgcccgccgcattcgtggggagagggcgtgaattgttttgagtacaaaccttaaatccaaaggctcttctcagagccaacca

SEQ ID NO: 15 - DNA, 6830 bp, human
ccacggtaaggggatgacgtagctttgccaaagacttagaagctaagcagaaaatgagcttaacatcctggtttttggtgagcagtggaggcactcgccacaggctgccacgagaaatgatttttgttggaagagatgactgtgagctcatgttgcagtctcgtagtgtggataagcaacacgctgtcatcaactatgatgcgtctacggatgagcatttagtgaaggatttgggcagcctcaatgggacttttgtgaatgatgtaaggattccggaacagacttatatcaccttgaaacttgaagataagctgagatttggatatgatacaaatcttttcactgtagtacaaggagaaatgagggtccctgaagaagctcttaagcatgagaagtttaccattcagcttcagttgtcccaaaaatcttcagaatcagaattatccaaatctgcaagtgccaaaagcatagattcaaaggtagcagacgctgctactgaagtgcagcacaaaactactgaagcactgaaatccgaggaaaaagccatggatatttctgctatgccccgtggtactccattatatgggcagccgtcatggtggggggatgatgaggtggatgaaaaaagagctttcaagacaaatggcaaacctgaagaaaaaaaccatgaagctggaacatcagggtgcagcatagatgccaagcaagttgaggaacaatctgcagctgcaaatgaagaagtactttttcctttctgtagggaaccaagttattttgaaatccctacaaaagaattccagcaaccatcacaaataacagaaagcactattcatgaaatcccaacaaaagacacgccaagttcccatataacaggtgcagggcatgcttcatttaccattgaatttgatgacagtaccccagggaaggtaactattagagaccatgtgacaaagtttacttctgatcagcgccacaagtccaagaagtcttctcctggaactcaagacttgctggggattcaaacaggaatgatggcacccgaaaacaaagttgctgactggctagcacaaaacaaccctcctcaaatgctatgggaaagaacagaagaggattctaaaagcattaaaagtgatgttccagtgtacttgaaaaggttgaaaggaaataaacatgatgatggtacgcaaagtgattcagagaacgctggggctcacaggcgctgtagcaaacgtgcaactcttgaggaacacttaagacgccaccattcagaacacaaaaagctacagaaggtccaggctactgaaaagcatcaagaccaagctgttactagctctgcgcatcacagaggggggcatggtgttccacatgggaaattgttaaaacagaaatcagaggagccatcggtgtcaatacccttcctacaaactgcattattaagaagttcagggagtcttgggcacagaccaagccaggagatggataaaatgttaaaaaatcaagcaacttctgctacttctgaaaaggataatgatgatgaccaaagtgacaagggtacttataccattgagttagagaatcccaacagtgaggaagtggaagcaagaaaaatgattgacaaggtgtttggagtagatgacaatcaggattataataggcctgttatcaacgaaaaacataaagatctaataaaagattgggctctcagttctgctgcagcagtaatggaagaaagaaaaccactgactacatctggatttcaccactcagaggaaggcacatcttcatctggaagcaaacgttgggtttcacagtgggctagtttggctgccaatcatacaaggcatgatcaagaagaaaggataatggaattttctgcacctcttcctttagagaatgagacagagatcagtgagtctggcatgacagtgagaagtactggctctgcaacttccttggctagccagggagagagaaggagacgaactcttccccagcttccaaatgaagaaaagtctcttgagagccacagagcaaaggttgtaacacagaggtcagagataggagaaaaacaagacacagaacttcaggagaaagaaacacctacacaggtataccagaaagataaacaagatgctgacagacccttgagtaaaatgaacagggcagtaaatggagagactctcaaaactggtggagataataaaaccctacttcacttaggcagctctgctcctggaaaagagaaaagtgaaactgataaggaaacttctttggtaaagcaaacattagcaaaacttcaacaacaagaacaaagggaggaggctcagtggacacctactaaattgtcttccaaaaatgtttcaggtcagacagataaatgtagggaggaaacttttaaacaagaatcacaacctccagaaaaaaattcaggacattctacaagcaaaggagacagagtggcacaaagtgagagcaagagaagaaaagctgaggaaattctgaaaagtcagactccaaagggaggagacaagaaggaatcctccaagtcattagtgcgacaagggagcttcactatagaaaaacccagcccaaacatacccatagaacttattccccatataaataaacagacttcctctactccttcttctttagcattaacatctgcaagtagaatacgagaaagaagtgagtctttggatcctgattctagtatggacacaacccttattctaaaagacacagaagcagtaatggcttttctagaagctaaactacgtgaagataataaaactgatgaaggaccagatactcccagttataatagagacaattctatttcaccagaatctgatgtagatacagctagtacaatcagtctggttactggagaaactgaaagaaagtcaacccaaaagcgaaagagtttcactagcctctataaagataggtgttccacaggttctccttccaaagatgttacaaaatcatcatcttcaggtgctagggaaaaaatggaaaagaaaacaaaaagtcgttccacagatgtgggttcaagagcagatggtcgtaaatttgttcagtccagtgggagaataagacagccctcagtagacttaacagatgatgaccaaacctctagtgtacctcattctgccatctctgatattatgtcatctgatcaagaaacttactcttgtaaacctcatggacggactccacttacctcagctgatgagcatgtacattccaaactggaaggaagtaaagtaacgaaatctaagacttctccggtggtatctggttcatctagtaaatcaaccacccttccaaggccacgacctaccaggacttccctcttgcgcagagcacgacttggtgaagcttcagacagtgaacttgctgatgctgacaaagcatctgttgcttctgaagtatccacaacaagttctacatcaaaacctcccacaggaaggcgtaacatctctcggattgatttattggctcagcctcgtagaacacgacttggctcactgtcagctcgtagtgactctgaagcaacaatttctagaagtagtgcctcttcgaggaccgcagaagccatcattagaagtggagccagactagtaccatcagataaattttctcctagaattagagctaacagtatctctcgactctcagactccaaggtcaaaagtatgacctcagctcatggctctgcttcagtaaattcaagatggaggcgctttcctactgattatgcttccacctcagaagatgaatttggatcaaaccgtaattcccctaaacatacccgtctacgtacttctccagccctgaaaaccactcgcttgcagagcgctggatcagcaatgcctactagttcttcattcaaacaccggattaaagagcaggaagactacatccgagattggactgctcatcgagaagagatagccaggatcagccaagatcttgctctcattgctcgggagatcaacgatgtagcaggagagatagattcagtgacttcatcaggcactgcccctagtaccacagtaagcactgctgccaccacccctggctctgccatagacactagagaagagttggttgatcgtgtttttgatgaaagcctcaacttccgaaagattcctccattagttcattccaaaacaccagaaggaaacaacggtcgatctggtgatccaagacctcaagcagcagagcctcccgatcacttaacaattacaaggcggagaacctggagcagggatgaagtcatgggagataatctgctgctgtcatccgtctttcagttctctaagaagataagacaatctatagataagacagctggaaagatcagaatattatttaaagacaaagatcggaattgggatgacatagaaagcaaattaagagccgaaagtgaagtccctattgtgaaaacctcaagcatggagatttcttctatcttacaggaactgaaaagagtagaaaagcagctgcaagcaatcaatgctatgattgatcctgatggaactttggaggctctgaacaacatgggatttcccagtgctatgttgccatctccaccgaaacagaagtccagccctgtgaataaccaccacagcccgggtcagacaccaacacttggccaaccagaagctagggctcttcatcctgctgctgtttcagccgcagctgaatttgagaatgctgaatctgaggctgatttcagtatacatttcaatagattcaaccccgatggggaagaggaagatgttacagtacaagaatgactttctcttgattgttgaaaaatcattacctgtggaatggctaggaatattggaagcagcatagtgttgatgtacgcaaaacaagacagcttggtcagctacaatcttggaatccctgtcttcttaattttatttatttatttttgacgtataatgtagtatatcaatcctttcaaactatttagataaccacttgatgcacaaataggaaaaagcagattgtggcagtgtcgccttttgtggttttatgattttcaaattgaatttaatgattacaccctttcccttcatagatcttttttcttttttttaagccatgctgtgacctacaagcaaactaaatagccaacatttctgaacccctaagtctcctgtgccaagctgctccctgaaatggacttcttcatctgtacagatttgttaaaccattctatttgcttcttaataataggatttatattagtactcattaccattggacacaatgacataagtactctccacagtaaagcagacctttcacaacagtcactctgtgtcctaaaattttccaacatagatgtgatttatataactttgttgatacgtaaattgtcttggggtttacggaaattaactattatgtttgcactaagatttgctgggagtggtaggtggacatatctatatatcaataaggactaaccgtcttttttgtacataggggattgataatactgtatttgttttaagcccacagtgtttttactccactttcaaaaagtcaatttgggcactttttttcatttttttttaatgggaataagatttggtctctcattttaggttaaatgataactagaaagattaaactagacagatagtttaggtggagtatatttttaaaactcagaacatgtatattggtcctgtgttaccaagtttatatgtgacagttgaaaaagaaattcccttgaaatgatcatgaggttaaaattttcttcattaggggacttggagaaccagtagtcgtaagattagttgatagtttcactcccaagcaatgaattgcttctgtgtgtttccctgtaggactcaatagtaaatgctgtctgtcttacacatttataaggaccctgcaagacgacgacaaaggcctttggcctgtgctactaaacaagaagcctatgaaaaatttcttctttaaacttgttttttctctttccagtaagttcacatttggataattttaaaaagaaaagtaattacctttgtgtttccagaacactataattggggtgtatcttaattcagttaaatattattagtagacctggattttcccccttgaccccatcagtctataaaggttaaactgcaacttttatgaaatggtctttaatatttccacaataatcctgtgctatatttgttttaagaaacaaagtaactctatacacttcaagactttacaggattttttaaatcctgtattgttggatcaattaataaagatgcaaaaaaactttatagagatgtaaaaacaaaactataatggatctcctatttttctttaaatacaaaaaaaaaaaggtaaatgaactattctccttgtaaagctaaattccccattctgtctaataaaggaagactgaaaaaaggttttaaagaacataaatggaaagatacaaatgctttgaaggaataaacgaaatgttaaaacagggtcaatccatttgaagaaaaagttggacaaaataatcagcattgctccctcttttatttaatatttgggtactgattatatccacatggaagtagaaggtaaggagtttaggaaaatactagaatctactctgcttacattcttgtttaagtgtttacacagtttggttcaattataaacatttggccttttactatgttatttttattttgtatgaatacattatcctccttatttatttttgttacatttattacttatgttattttgttatgcatttacaactccatttttaaataaagtgtttctggaacttt

SEQ ID NO: 16 - DNA, 2001 bp, human
ggccgcggtggtggctgcggcggcggcggcgggagcagcatggattggggcactgagctgtgggatcagttcgaggtgctcgagcgccacacgcagtgggggctggacctgttggacagatatgtaaagttcgtgaaagaacgcaccgaagtggaacaggcttacgccaaacaactgcggagcctggtgaaaaaatatctgcccaagagacctgccaaggatgatcctgagtccaaattcagccagcaacagtccttcgtacagattctccaggaggtgaatgactttgcaggccagcgggagctggtggctgagaacctcagtgtccgtgtatgtcttgagctgaccaagtactcacaagagatgaaacaggagaggaagatgcacttccaagaagggcggcgggcccagcagcagctggaaaatggctttaaacagctggagaatagtaagcgtaaatttgagcgggactgccgggaggcagagaaggcagcccagactgctgaacggctagaccaggatatcaacgccaccaaggctgatgtggagaaggccaagcagcaagcccaccttcggagtcacatggccgaagaaagcaaaaacgaatatgcggctcaactgcagcgcttcaaccgagaccaagcccacttctatttttcacagatgccccagatattcgataagctccaagacatggatgaacgcagggccacccgcctgggtgccgggtatgggctcctgtcggaggccgagctggaggtggtgcccataatagccaagtgcttggagggcatgaaggtggctgcaaatgctgtggatcccaagaacgactcccacgtccttatagagctgcacaagtcaggttttgcccgcccgggcgacgtggaattcgaggacttcagccagcccatgaaccgtgcaccctccgacagcagtctgggcaccccctcggatggacggcctgaactccgaggcccgggtcgcagccgcaccaagcgctggccttttggcaagaagaacaagacagtggtgaccgaggattttagccacttgcccccagagcagcagcgaaaacggcttcaacagcagttggaagaacgcagtcgtgaacttcagaaggaggttgaccagagggaagccctaaagaaaatgaaggatgtctatgagaagacacctcagatgggggaccccgccagcttggagccccagatcgctgaaaccctgagcaacattgaacggctgaaattggaagtgcagaagtatgaggcgtggctggcagaagctgaaagtcgagtccttagcaaccggggagacagcctgagccggcacgcccggcctcccgacccccccgctagcgccccgccagacagcagcagcaacagcgcatcacaggacaccaaggagagctctgaagagcctccctcagaagagagccaggacacccccatttacacggagtttgatgaggatttcgaggaggaacccacatcccccataggtcactgtgtggccatctaccactttgaagggtccagcgagggcactatctctatggccgagggtgaagacctcagtcttatggaagaagacaaaggggacggctggacccgggtcaggcggaaagagggaggcgagggctacgtgcccacctcctacctccgagtcacgctcaattgaaccctgccagagacgggaagaggggggctgtcggctgctgcttctgggccacggggagccccaggacctatgcactttatttctgaccccgtggcttcggctgagacctgtgtaacctgctgccccctccacccccaacccagtcctacctgtcacaccggacggacccgctgtgccttctaccatcgttccaccattgatgtacatactcatgttttacatcttttctttctgcgctcggctccggccattttgttttatacaaaaatgggttttttttttttctttaatatatttcaagagatttttttttttttttttttt

SEQ ID NO: 17 - DNA, 2956 bp, human
cgaggcgcggctccggggattcggctcgggccgctggctctgctctgcggggagggagcgggcccgcccgcggggcccgagccctccggatccgccccctccccggtcccgccccctcggagactcctctggctgctctgggggttcgccggggccggggacccgcggtccgggcgccatgcgggcatcgctgctgctgtcggtgctgcggcccgcagggcccgtggccgtgggcatctccctgggcttcaccctgagcctgctcagcgtcacctgggtggaggagccgtgcggcccaggcccgccccaacctggagactctgagctgccgccgcgcggcaacaccaacgcggcgcgccggcccaactcggtgcagcccggagcggagcgcgagaagcccggggccggcgaaggcgccggggagaattgggagccgcgcgtcttgccctaccaccctgcacagcccggccaggccgccaaaaaggccgtcaggacccgctacatcagcacggagctgggcatcaggcagaggctgctggtggcggtgctgacctctcagaccacgctgcccacgctgggcgtggccgtgaaccgcacgctggggcaccggctggagcgtgtggtgttcctgacgggcgcacggggccgccgggccccacctggcatggcagtggtgacgctgggcgaggagcgacccattggacacctgcacctggcgctgcgccacctgctggagcagcacggcgacgactttgactggttcttcctggtgcctgacaccacctacaccgaggcgcacggcctggcacgcctaactggccacctcagtctggcctccgccgcccacctgtacctgggccggccccaggacttcatcggcggagagcccacccccggccgctactgccacggaggctttggggtgctgctgtcgcgcatgctgctgcaacaactgcgcccccacctggaaggctgccgcaacgacatcgtcagtgcgcgccctgacgagtggctgggtcgctgcattctcgatgccaccggggtgggctgcactggtgaccacgagggggtgcactatagccatctggagctgagccctggggagccagtgcaggagggggaccctcatttccgaagtgccctgacagcccaccctgtgcgtgaccctgtgcacatgtaccagctgcacaaagctttcgcccgagctgaactggaacgcacgtaccaggagatccaggagttacagtgggagatccagaataccagccatctggccgttgatggggaccgggcagctgcttggcccgtgggtattccagcaccatcccgcccggcctcccgctttgaggtgctgcgctgggactacttcacggagcagcacgctttctcctgcgccgatggctcaccccgctgcccactgcgtggggctgaccgggctgatgtggccgatgttctggggacagctctagaggagctgaaccgccgctaccacccggccttgcggctccagaagcagcagctggtgaatggctaccgacgctttgatccggcccggggtatggaatacacgctggacttgcagctggaggcactgaccccccagggaggccgccggcccctcactcgccgagtgcagctgctccggccgctgagccgcgtggagatcttgcctgtgccctatgtcactgaggcctcacgtctcactgtgctgctgcctctagctgcggctgagcgtgacctggcccctggcttcttggaggcctttgccactgcagcactggagcctggtgatgctgcggcagccctgaccctgctgctactgtatgagccgcgccaggcccagcgcgtggcccatgcagatgtcttcgcacctgtcaaggcccacgtggcagagctggagcggcgtttccccggtgcccgggtgccatggctcagtgtgcagacagccgcaccctcaccactgcgcctcatggatctactctccaagaagcacccgctggacacactgttcctgctggccgggccagacacggtgctcacgcctgacttcctgaaccgctgccgcatgcatgccatctccggctggcaggccttctttcccatgcatttccaagccttccacccagctgtggccccaccacaagggcctgggcccccagagctgggccgtgacactggccgctttgatcgccaggcagccagcgaggcctgcttctacaactccgactacgtggcagcccgtgggcgcctggcggcagcctcagaacaagaagaggagctgctggagagcctggatgtgtacgagctgttcctccacttctccagtctgcatgtgctgcgggcggtggagccggcgctgctgcagcgctaccgggcccagacgtgcagcgcgaggctcagtgaggacctgtaccaccgctgcctccagagcgtgcttgagggcctcggctcccgaacccagctggccatgctactctttgaacaggagcagggcaacagcacctgaccccaccctgtccccgtgggccgtggcatggccacaccccaccccacttctcccccaaaaccagagccacctgccagcctcgctgggcagggctggccgtagccagaccccaagctggcccactggtcccctctctggctctgtgggtccctgggctctggacaagcactgggggacgtgcccccagagccacccacttctcatcccaaacccagtttccctgccccctgacgctgctgattcgggctgtggcctccacgtatttatgcagtacagtctgcctgacgccagccctgcctctgggccctgggggctgggctgtagaagagttgttggggaaggagggagctgaggagggggcatctcccaacttctcccttttggaccctgccgaagctccctgcctttaataaactggccaagtgtgaaaaaaaaaaaaaaaaaaaaaaa

SEQ ID NO: 18 - DNA, 889 bp, human
gcgaactggtggcagtgagagacttcggcggacatggctcccagcgtgccagcggcagaacccgagtatcctaaaggcatccgggccgtgctgctggggcctcccggggccggtaaagggacccaggcacccagattggctgaaaacttctgtgtctgccatttagctactggggacatgctgagggccatggtggcttctggctcagagctaggaaaaaagctgaaggcaactatggatgctgggaaactggtgagtgatgaaatggtagtggagctcattgagaagaatttggagacccccttgtgcaaaaatggttttcttctggatggcttccctcggactgtgaggcaggcagaaatgctcgatgacctcatggagaagaggaaagagaagcttgattctgtgattgaattcagcatcccagactctctgctgatccgaagaatcacaggaaggctgattcaccccaagagtggccgttcctaccacgaggagttcaaccctccaaaagagcccatgaaagatgacatcaccggggaacccttgatccgtcgatcagatgataatgaaaaggccttgaaaatccgcctgcaagcctaccacactcaaaccaccccactcatagagtactacaggaaacgggggatccactccgccatcgatgcatcccagacccccgatgtcgtgttcgcaagcatcctagcagccttctccaaagccacatgtaaagacttggttatgtttatctaatgttgggtccaagaaggaatttctttccatccctgtgaggcaatgggtgggaatgataggacaggcaaagagaagcttcctcaggctagcaaaaatatcatttgatgtattgattaaaaaagcacttgcttgatgt

SEQ ID NO: 19 - DNA, 2964 bp, human
agtcggcggcggctgctgctgcctgtggcccgggcggctgggagaagcggagtgttggtgagtgacgcggcggaggtgtagtttgacgcggtgtgttacgtgggggagagaataaaactccagcgagatccgggccgtgaacgaaagcagtgacggaggagcttgtaccaccggtaactaaatgaccatggaatctggagccgagaaccagcagagtggagatgcagctgtaacagaagctgaaaaccaacaaatgacagttcaagcccagccacagattgccacattagcccaggtatctatgccagcagctcatgcaacatcatctgctcccaccgtaactctagtacagctgcccaatgggcagacagttcaagtccatggagtcattcaggcggcccagccatcagttattcagtctccacaagtccaaacagttcagatttcaactattgcagaaagtgaagattcacaggagtcagtggatagtgtaactgattcccaaaagcgaagggaaattctttcaaggaggccttcctacaggaaaattttgaatgacttatcttctgatgcaccaggagtgccaaggattgaagaagagaagtctgaagaggagacttcagcacctgccatcaccactgtaacggtgccaactccaatttaccaaactagcagtggacagtatattgccattacccagggaggagcaatacagctggctaacaatggtaccgatggggtacagggcctgcaaacattaaccatgaccaatgcagcagccactcagccgggtactaccattctacagtatgcacagaccactgatggacagcagatcttagtgcccagcaaccaagttgttgttcaagctgcctctggagacgtacaaacataccagattcgcacagcacccactagcactattgcccctggagttgttatggcatcctccccagcacttcctacacagcctgctgaagaagcagcacgaaagagagaggtccgtctaatgaagaacagggaagcagctcgagagtgtcgtagaaagaagaaagaatatgtgaaatgtttagaaaacagagtggcagtgcttgaaaatcaaaacaagacattgattgaggagctaaaagcacttaaggacctttactgccacaaatcagattaatttgggatttaaattttcacctgttaaggtggaaaatggactggcttggccacaacctgaaagacaaaataaacattttattttctaaacatttctttttttctatgcgcaaaactgcctgaaagcaactacagaatttcattcatttgtgcttttgcattaaactgtgaatgttccaacacctgcctccacttctcccctcaagaaattttcaacgccaggaatcatgaagagacttctgcttttcaacccccaccctcctcaagaagtaataatttgtttacttgtaaattgatgggagaaatgaggaaaagaaaatctttttaaaaatgatttcaaggtttgtgctgagctccttgattgccttagggacagaattaccccagcctcttgagctgaagtaatgtgtgggccgcatgcataaagtaagtaaggtgcaatgaagaagtgttgattgccaaattgacatgttgtcacattctcattgtgaattatgtaaagttgttaagagacataccctctaaaaaagaactttagcatggtattgaaggaattagaaatgaatttggagtgctttttatgtatgttgtcttcttcaatactgaaaatttgtccttggttcttaaaagcattctgtactaatacagctcttccatagggcagttgttgcttcttaattcagttctgtatgtgttcaacatttttgaatacattaaaagaagtaaccaactgaacgacaaagcatggtatttgaattttaaattaaagcaaagtaaataaaagtacaaagcatattttagttagtactaaattcttagtaaaatgctgatcagtaaaccaatcccttgagttatataacaagatttttaaataaatgttattgtcctcaccttcaaaaatatttatattgtcactcatttacgtaaaaagatatttctaatttactgttgcccattgcacttacataccaccaccaagaaagccttcaagatgtcaaataaagcaaagtgatatatatttgtttatgaaatgttacatgtagaaaaatactgattttaaatattttccatattaacaatttaacagagaatctctagtgaattttttaaatgaaagaagttgtaaggatataaaaagtacagtgttagatgtgcacaaggaaagttattttcagacatatttgaatgactgctgtactgcaatatttggattgtcattcttacaaaacatttttttgttctcttgtaaaaagagtagttattagttctgctttagctttccaatatgctgtatagcctttgtcattttataattttaattcctgattaaaacagtctgtatttgtgtatatcatacattgttttcaataccacttttaattgttactcattttattcactaagctcgataaatctaacagttactcttaaaaaaaaaaaaaagactaaggtggattttaaaaattggaaactgacataatgttaggttataatttctcatttggagccgggcgcagtggctcacgcctgtaatcccagcactttgggaggccaaggtgggtggatcacctgtggtcaagagttcaagaccagcctggccatcatggtgaaaccccatctctactaaaaatacaaaaattagccaggcgtggtggctggcgcctgtaatcccagctactcaggaggttgaggcagcagaattgcttgaacccaggaggcagagggttgcagtgagccgagatagcaccattgcactccagcctgggcgactccatctcaaaaaataaaaaaaaaaaaaaa

SEQ ID NO: 20 - DNA, 1004 bp, human
atgggtctggagctctacctggacctgctgtcccagccctgccgcgctgtttacatctttgccaagaagaacgacattcccttcgagctgcgcatcgtggatctgattaaaggtcagcacttaagcgatgcctttgcccaggtgaaccccctcaagaaggtgccggccttgaaggacggggacttcaccttgacggagagtgtggccatcctgctctacctgacgcgcaaatataaggtccctgactactggtaccctcaggacctgcaggcccgtgcccgtgtggatgagtacctggcatggcagcacacgactctgcggagaagctgcctccgggccttgtggcataaggtgatgttccctgtgttcctgggtgggccagtatctccccagacactggcagccaccctggcagagttggatgtgaccctgcagttgctcgaggacaagttcctccagaacaaggccttccttactggtcctcacatctccttagctgacctcgtagccatcacggagctgatgcatcccgtgggtgctggctgccaagtcttcgaaggccgacccaagctggccacatggcggcagcgcgtggaggcagcagtgggggaggacctcttccaggaggcccatgaggtcattctgaaggccaaggacttcccacctgcagaccccaccataaagcagaagctgatgccctgggtgctggccatgatccggtgagctgggaaacctcacccttgcaccgtcctcagcagtccacaaagcattttcatttctaatggcccatgggagccaggcccagaaagcaggaatggcttgcttaagacttgcccaagtcccagagcacctcacctcccgaagccaccatccccaccctgtcttccacagccgcctgaaagccacaatgagaatgatgcacactgaggccttgtgtcctttaatcactgcatttcattttgattttggataataaacctggctcagcctgagcctctgcttct

SEQ ID NO: 21 - DNA, 8093 bp, human
ctcagctccctgtggtgggggatggcagaggcttcccgctccccgcagctggtttgcacagcctcccgactgtgccgtggtgtctccttccctaaagtgggacagtcgtttctgtgtcctgctggcctctgaggaacagacgtgtgtgagaggccttcagggcctgatggctggggtggtgacagtgcctggagaatgggtggggactggaggggccaggtggctaaccactctcctcttccatggcagcggagctggagttcgcccaaatcatcatcatcgtcgtggtggtcacggtgatggtggtggtcatcgtctgcctgctgaaccactacaaagtctccacgcggtccttcatcaaccgcccgaaccagagccggaggcgggaggacgggctgccgcaggaagggtgcctgtggccttcagacagcgccgcaccgcggctgggcgcctcggagatcatgcatgccccgcggtccagggacaggttcacagcgccgtccttcatccagagggatcgcttcagccgcttccagcccacctacccctatgtgcagcacgagattgatcttcctcccaccatctccctgtccgacggtgaagagccacctccttaccaggggccctgcaccctgcagctccgggaccctgaacagcagatggaactcaaccgagagtccgtgagggccccacccaaccgaaccatatttgacagtgatttaatagacattgctatgtatagcgggggtccatgcccacccagcagcaactcgggcatcagtgcaagcacctgcagcagtaacgggaggatggaggggccaccccccacatacagcgaggtgatgggccaccacccaggcgcctctttcctccatcaccagcgcagcaacgcacacaggggcagcagactgcagtttcagcagaacaatgcagagagcacaatagtacccatcaaaggcaaagataggaagcctgggaacctggtctgattccttccaacgtgcacttcagctggagaaagaaaccaagaagggaagcggccgctgggcccctcctgcgcacagtgttgttcagtttcacatggtacaaataagtaaaaccaaatgagcaaacacggtctttgtttctgattccttttaggggaattgcatgcaaactagactgaaatgatacaaacttccatctggtctgaccgcaaacagtgtttatttggggacaggggttgggatgggggtgtgggcaggggaaaacagagaacgggatgctttgaagataccatgaaataaaacccacagaggtatttgatgtatttaattgtgaaaggagactttgcagataaatgaggccagaatggcatgttttataattaactgaataaagaaggaagcattattatatattattgtggggaagaaccagccagttcgctttttctcctaaggtgtggacttttattttgttttaaaaatatgaatcaaaattcctgtgttgtgtgccaaggtataaagtggagaagttagatgagtgcaaggagctcctttgtgttgtgatgatgtgttttaaaagttgcactatcttaatgttgaaaatatttacaagggaactgttttacgtgaagttctgtatgttgtcttttcacctgtggattgtaatcaggcccaaggaatatcctggagtggtccccagaagcatccaagaaaagatatttggggacgtagcctaacattttaccaacttacgtaaatcaaaaaagtcattattgttgcaggagtttgcatcaaatagcagtgcatcgctgaagcttttggagacttttggatggaagataagatagggaagattaagttccagcatttctgacttgttattttgagttactctgctactcttaggctgcatagtttatgagaaaatgaacacatgcatttatggatccagtatcatgcagtgctgccctcatcctccagcagtgcaatttcttcagtaatttagatttttttcactatagcatgaaatatattcaaatacataccttattttatgcaataaattgtttaaaatgcaaggtggttattctgcatactgttgaaatatgtgactcctcagtatattcccattgcctctccccctttcctcgacagcttagttcagttctgcagggctgctcagttcacaggaggctcccagcagccaccccacatccagcctacacagaactttcgtgtgggagtggtgtgggtggtggttttcttatgctttggaagcccctagaaataatgacggaagaatgccatgttgctgatcgtggtaataagccattgtgggttattgtatgtcactagtattagcatagcattcttaaaggaatgcagtgttcaaaacctacccaaattccccgcaggattttaccaaacccttccccaggccagttttgtactgaaggcaagaactggacagtcagagaacagtggagggggcaagtgactgaagagcaccgggtaaaaagcacaacatgcagttaaaatgcaaactagaaaactaattttaaatattgttagttttaatatttcctgatatttacaaatattcattcttatatacaatgaaaaaaataactttcttctgcagatgtaagcactggcttttataagagcagcagccaacacgtttagcagacactgcgcgtggagaagggcttatctgcagtacactctgccatgtggagggtgggcctctgtggcctcttcacataacaagatgagctggaatgatgattccatgactcccacctatgcagccttaaagccaaatccgcgtgtgtgtgtttgtgtctgtctgtgggtctcgaaggtgatccgtcggtgcggtggctctgtgctgtaactggagagactgttccaaaccccaagagttgtctgatcctagtctgttcccttctgcttcttacctctgtagataggtcactggtttttgtttgtttgttttgaggattggaatttccattacattcatcctttgcacacagtaacatccacagaactagtccaactcttaaaaggagagaggaaaaacacaggcaccagttgtcagctcatgcttacaacctgtgtggaagtatatacagttgagagtcacagtggaggttctgagactggattcagtcttgttccagtgacagttggaaggcctctgctggagagacaccagctctcagggcagagattggcttggggccagaaggaccctccccaaccctggagacaccctgaaggttcactggctctccagattagcctctcttcctctgtcaggcaaagatgaggagcccgtgttcccatcgggccctgctggcagggacttgcagtggattcttggtcaggtgtgcccacagatgcggaggcgaggtgagtgattccatcatttcagttctcacctgcagttttggtgaagcaggagatgcaccccacagctctagctctcaaatggcttcacagtccttacttctctacctgcctcaagaaggggctcagagcagagacttgtgaattccttagtaactgtgagtatatgaatgtgttgcacatgtccacagtattggcgagataattacataattcagatacctttaatcatctttcaagaaagaggctcctcccattcaaccaccctagagaactgcctttgttaaatagttatttaaagactcatacatatcaaaccatgactttgaaaggtcttcgaggctggggctctgtaatgaattagtttaaaagccaaggtcataacatgaattgatggtcaatttcccttcagcagaaggaaaaggtgatttagatcagtagctcttttgaaggttgtggctgacctgttcataccgtgtcgcctcatggctagtgtggcgttgaaagagtagcgactgggaagatacaacttacacagtggggcctattgttctttcaagaaccctttttttagcttatagaacccatgggtccagtttagtaacgagtgatttaggcaatcaatgataggtttataatcttagattattccagcaaagtgtggattgcattgttaggaagaacatttggtgggaatgaacactcctgggcataccgctgacttttgtcccttgttcccggtgtaggagacccaaggcatcttgaatcccatctataagaacacaatcttccagcatacgtttgctttttcagaaactctagcattctctttaaatactgacgcaatccttaatggaaaagagatttcatgaagcaaattatgtatttcaatagttcttctatttttagtgtccaaaatttactaatacagaagcttgacaagcatgtcctcaccctccccaccacataaacacatggacacacacccaagccacaagaaatcccaagagagcagaagcgaatttttaaaagatttatcgtgaggactgcatttccattcactaattttggctcaaacttatgaggcaggaaataggggccaacagtaaatgggggaggcctcctgacaccagcagaggaattttgtacccaggcgaggacttcttgaacttctgcgtatctccgtttgatctctttcacctttatttcatcttcataagaatgagaaaggctcaaaaggaagcacttttagaaatcttctctgacctagaagaatccatccaaatccctgccttcctctctgaaccaacagttcccttctctgacagggggccatcctctatcttccatccagcggctcttccttttaggaaggctctggtgcagagcacttcaaatatgtcctcaggccagatactgattgctagtagagagacacccggcacccagtccgaagccctccctcaaaggaccggcttatggcgttggtcactggcaggctcagagacattctactgtgggcgcagggagcccggccccccatgcagccatgactggatgcgcccccatctcgggggcttgctgcactgcttgtttattgaattttgctacttagaatggcaacattaactttgtgtaccattcattttttaaaaattttccaaagctcggcagtgtatgaaagaaaaaactgggaaagatacttggtttctgttaacttttgtgttgcttgcttaagtgattaaagccagtgcttggagccaagccttcatgccacgaacatgctccacagcctgccctttgctctcctgctcacactgaccaagaatgccgcgtgcttggcctactgaggtgaaaggacaattgaatgacaggtgggcaaagggagaacttccccttcttggtgcgaggaaagtcacaaatttaaaaatgttgcttccagcccagatcctaaatgctagttctcagcagctgcgtggcttaccgttcgccatttccaccaccgccagctgccagcaccgctacagatcacagagatgtgaacagacaatggaaagcactcttagccttgcagtggtctacattttttaggaaccaatatttcagcattctttattacccggcacgctgtgtcctttgcagagttcaagtttatgttactgccagggtcagacagtcatttgctgctgctgctgctgctgctgctgcttctcgaactggatgcattaggaagctgctgtctgagtgtaggaatgtcttgctaagaaagcaatgtcttccttcatccttttctttcttccctctgcgtgtccttgtttttgtgtaatgcgggagagggttagagctatagagattatatatacactatccgtgcacattatatatatgtagatatacccctatcatgtcagagatctgcatgtcagtttttcagcaactaaggtgcctcatgttctgagttcagcagatataggaaccaagccgccccctcctgcacttgatgctcccacctttgttgtgcctcacttaaaatggtgcttttttcagttgtctgtcttttcttatgtttttatttgtaaggtgctgtatataagttgaatatattatgcacatatcctacccaatgggtagaacaaaaagttgttaatactgtaatataatgtatagatgataccaattttaacagaaatggcatagaatttgtgaatgcctatgtgctttgtcctcttttgtaaggaaatttgcaaatggatgcatacagattaaagtctatgtagtttattttcctattaaatatcaatattataacacaagagaaagaagtgtgaacaaacaagcaacagtttatgaccagcgtatatatagcaatggaaagttgcatctttgctgtgaaaacactttaaagaaaatactttttaaaaaatcccacagctttttggttgccactagacgcttcttattttaatcattttagtaatgctcagctggaccagtgttagttatatttgagtcagaaaaatgttgtttttcaacttgctttataatctcctgcatctatctcctgctgtagcatcaygaaggtgtcaggcaacagtgaaaagtgcacatttttgttgttgcagaaactgtgtcagaggaataagtaaatcagcctgcagcagaagactttgttcagctccagaggcatctgtgaccgtctgtgtccaagtctctctgtgcctttttcttttacaaactgaagctgtggagccaatgaagtaacagtagagattgtagggaaagaatacctcaggaaaaacaaatacacttacaagaagaccctgttcttagaaaatgtgtttagttatgggttagcactagaagagacttggctgtcagccagccaagtgaaggacctctcatccattcccattcatgtcccatcataatacggacmcaaaaagcaaactcggttttgccatcagttagaaattacgttttggattgtatattgttacatctctcttccagcttagtttttagtgtctgattgtgacctctgcatttatcttcaaataccctaattttaaaacaaaagaacaagaaaagtttataacaccatgttcactaaaaccacggttgaatcttgggtgtgggcatcctttcgagtgttgtccataagagcagttcgtggaattttgcccatctgacccatattatcagcttattctgccaccagagtagagtctaataaattccaaagtttttatttgctccatggtgtatgttctgactttgaaaatgtcagattctataatcatacccctaacatccaggagacaaatgacagattatctttaaactgaaattgactctacaatgcaacccttaatgctgaatggattaaaaaagtcagcccttttagtatctgtttgaaagggccgtaaaaagttgacacttttgttgttgtggatcctgcgtgtctagacccacgtgttgtttccatcgtatactgtagggtgcaccccttgggattcatcattaagaactgaggctcactgttgtcagaaacaaagctcccaccccccaggttcaaccttgtgggagaactgttgagcatgagaatgttctagactcagaggtactaaaatttgttaccacatcattgcttcctttctacaggacgaattgaggcttaaactttactgttaatgatactggttcattttaatgtgcttgttggtatgttgctatttttcatttcatagctttcaaaaatcatgctaattgtatacttgtctagtttaaggctattttaaaatatgtacaatactattcacagcatttagttcgtttaatttttattataaagcaatctactaaaaaagtacaactgtatttgaacttttcaatagttgtttgtgagctatgataatcaaaagtcattaaagtcttttttaacaaacattcgtgcttacttttcaacataattcccagttatatacagaaaaagatttccacctgtcacgtatctgcctcttttacctgagcaatggtgtagttcttagacctaaggtctgtaattgcaatacttttaaagaaagatgttgctctaagtgctgtttgttagttatgaaatcagatttttctgcttgttcttaatgctgtggtcaaaccatagcacaaaatcattaaaaataatcagcggcatac

SEQ ID NO: 22 - DNA, 999 bp, human
tttttttggcggtataaaagtgcttctttatttggtcatacagctttcaaatgttgcttaacgaacagatagcatttttataatcagaggaaagactcagtattaaagtgcgcgtcccatcattgcaaccgggccctcgggcagccagctctctcttgcttcgcgtccggctctcaggccctggagctcggcctccctaccttctccaggcgcgggtcctgctccttttccggccgcccttcctcagcccccggctcggacactctgcaggagaccaagagaagggggaaatggggctgggggccgtccccgggagacaggcggccttccgagagggactggagcaggccgtgcggtatgccaaagccctgggctgtcccaggatccacctgatggctggccgagtaccccagggagctgatcgaatagcagtcaaggctgagatggaggccgtttttctggagaacctgaggcatgcagctggggttttggctcaggaggacctcgtgggactgctggagcccatcaacacccgcatcactgacccccagtacttcctggacacgccccagcaggcggcagccatcttacagaaggtaggaagacccaacctccaattacaaatggacatattccactggcagatcatggatgggaacctgacaggaaacatccgggagttcctgcccattgttgggcatgtgcaggtggcacaggtcccaggccgaggggagcccagcagccccggagagctgaatttcccctatctgtttcaactgctggaagatgaaggctacaaaggcttcgtgggctgtgagtatcagcctcgaggagacacagtagagggcttgagttggctacgttcatactgggataggcggggccacccagaggctggccagtgagggcccgcacaccacccacgtgcctccagacagcgagtgacatcccatctcctcctctgcattaaagatgacctgctgaaaaaaaaaaaaaaaa

SEQ ID NO: 23 - DNA, 2316 bp, human
tcaaaataaaattcctgaatttgtacaagccacaggaagctagattgagatcattatatgacaactggaaggccaaggctatgggttacctcaaattgaggaattttggcacctactcacaggctccatgagcagatgaagtagacagctttactcagtatctcagaccaagaacttcatctccatctccaactagctgaaacatcttccctcctcaacctggaaaattctctgacttagaaatttaaacaaaaccctcccctttcattgaatctccattgtctggagtttgcttgttttaatctagcctgttcctccactatgggctccctttcaaactatgccctgcttcaactaacccttactgcttttttgacaattctagtacaacctcagcacctgcttgctccagttttccggacactatctatcttgactaatcagtctaattgctggttatgtgaacatctagataatgcagaacaacccgaactagtttttgttcctgccagtgcaagcacctggtggacctattctggacaatggatgtatgaaagggtgtggtatccacaagcagaagtacagaatcactctacttcctcctatcgtaaagtgacttggcactgggaagcctccatggaagctcaaggtctatcctttgctcaagtaaggttattggagggaaatttttctctttgcgtagaaaataaaaatggcagtggacccttcctaggtaatatacctaaacaatactgtaatcaaatactatggtttgattctacagatggcaccttcatgccctctatagatgttacaaatgaatccaggaacgatgatgatgatacaagtgtttgcctaggcactagacaatgttcctggtttgcaggttgcacaaaccggacctggaacagctcagctgttcccttgattggtctgcccaatacccaagactacaaatgggtagatcgaaattctggattgacctggtcaggtaatgacacctgtctctatagctgccaaaaccaaaccaaaggccttctgtaccagctatttcgcaacctattttgctcttatggcctgacagaggcacatgggaaatggagatgtgcagatgccagcataactaatgacaaaggtcatgatggacaccggacccccacctggtggctcacaggttccaatctgaccttgtctgtgaacaactctggcctcttttttttgtgcggcaatggggtgtacaaagggtttccacctaaatggtctgggcgatgtggacttgggtatcttgtaccttccctcaccagatacctcaccttaaatgctagccaaattacaaacctgagatccttcattcataaagtaacaccgcatagatgcacccaaggagacacagacaatccacctctgtattgcaaccccaaggacaattcaacaataagggccctttttccaagtttgggaacttatgatttagaaaaggcaattctaaacatttccaaagcaatggaacaggaattcagtgccactaagcagaccttggaagcacaccaatcaaaagttagcagtttagcctctgcatcccgaaaggatcatgtcttggatataccgaccacccaacgacaaacggcttgtggaactgttggcaaacagtgttgcctctatataaattattcggaagaaataaagtctaatatacagcgtctccacgaagcatccgagaacctgaagaatgtaccgttacttgattggcaaggcatatttgcaaaagtgggagactggttcagatcatggggctatgtgcttttaattgttcttttctgcttattcatctttgttttaatctatgttcgtgtctttcgcaaatctcgcagatcccttaactcccaacctctgaacctagccttatctccacagcaatcagcacagctccttgtcagtgaaacttcatgtcaagtttcaaatagggcaatgaagggactaacaacccatcaatatgatacaagtctactttgagaatatctgaacaaacagcagctgcagacaaaaagccttagctaaactttgatgagtaaagcaggtcttaccgagaattcagctgccaaaaccctcctctgagtgttcctcttataagggcacttagcactaggacctcccaaggtattgtaaataagccttatcagaactttttgtagtttcattctgaagccttaagacacacaccataaagctgatctgtaaacccttaccccttgctgttcagagagctactctttgtagtgttcttgcatgcatatataataaatgttttttctattg

SEQ ID NO: 24 - DNA, 2133 bp, human
caaccgcgccgtctgtccctggcaagccagcggcggtttaaaggaggtggcgggaagcctgtgtgtgcttcaaatcgtcaccctcatggtcgctccggtttttcacgactgaaaataacatagcaaaataagccaagatgtctgtggatccaatgacctacgaggcccagttctttggcttcacgccacaaacgtgcatgcttcggatctacattgcatttcaagactacctatttgaagtgatgcaggccgttgaacaggttattctgaagaagctggatggcatcccagactgtgacattagcccagtgcagattcgcaaatgcacagagaagtttctttgcttcatgaaaggacattttgataacctttttagcaaaatggagcaactgtttttgcagctgattttacgtattccctcaaacatcttgcttcctgaagataaatgtaaggagacaccttatagtgaggaagattttcagcatctccagaaagaaattgaacagttacaggagaagtacaagactgaattatgtactaagcaggcccttcttgcagaattagaagagcaaaaaattgttcaggccaaactcaaacagacgttgactttctttgatgagcttcataatgttggcagagatcatgggactagtgattttagggagagtttagtatccctggttcagaactccagaaaactacagaacattagagacaatgtggaaaaggaatcgaaacgactgaaaatatcttaattgctcagtagtcaaaaggaggagcctgtcaaaaagtagaatcataaggactgttcaaaccataaggactgttcaaatcataccagtgactgttcaaaccaaccatactttttattagatttgctttgtcaactctttcttgtattctgtgttttcctcttttttggtccactttgctgaggtatgaagtgtactactttgaactaggctgaagcatctgagtcttctaataagtgggaagggatccaacaaagaagccatgaccagttaaagatatttgcagagttacaccttggtcataagtcctttgtgaccttgattattttggcttactctttggatgagaccagacaagaaaaggattaaacgggtggctcctttaatattattattattgtttttgagacaaggtccctttctgtcacccaggttagagtagatttcagtggcacaatcttggctcactgcaacctctgtgtcctgggctcaagtgatcctcctgcctcagcctcccaagtagctaggaccacaggtgcgtgtcaccatgcttggctaatttttttgcagaaacgaggcctcactatattgtccaggctgagtggctcttttattaaccagtcattacactgcggaacagccaacatagagtacttgctctcgccctgtgaattttctttcatgagggagtcaatatgtagtggaaagaagcatgtagcaaaaaagacaaccttgatctttaataaaaaagaagttggtttatttccaaaataaatcccctgacaaaaaacctggtgatgttaagcaattgactgtcttagagtccagcagaagaccttagacaaaaaaagcagaacccactggagtagaaaaggaagcatgtagcatatactcagtagtgaaatttaattttactgactgttaggtatctatgccaatttgttttcatacttcagttggttttggaatctgccttatacctaatatttaattatttattcacactcataagcatcaaatatttaatgccctcagtgggaaaattgtgtttaaactcaatggaatctaatatttctttatgtcgttagtccctgtaaaatgttaggtcacccaaggaaaggggagaaatagcaatggttgttcctaaggtattgcttgccctccatgtcttcctaaagagcagaacttggagtttctcctttatgtagagaagaagtaacttagggtgtatttgcaatgaaatattcatagatattgaaagcttgtgtttacatgaaatatgtttattatcaagaattcctttttccaattctgtacattaaatatatgtgttttaaaggaaaaaaaaaaaaaaaaaaaaaaaaaaaaaaaaaaaaaaaaa

SEQ ID NO: 25 - DNA, 1336 bp, human
cctaactccaatcactggcaactcctgagatcagaggaaaaccagcaacagcgtgggagtttggggagaggcattccataccagattctgtggcctgcaggtgacatgctgcctaagagaagcaggagtctgtgacagccaccccaacacgtgacgtcatggccagtagggaagatgagctgaggaactgtgtggtatgtggggaccaagccacaggctaccactttaatgcgctgacttgtgagggctgcaagggtttcttcaggagaacagtcagcaaaagcattggtcccacctgcccctttgctggaagctgtgaagtcagcaagactcagaggcgccactgcccagcctgcaggttgcagaagtgcttagatgctggcatgaggaaagacatgatactgtcggcagaagccctggcattgcggcgagcaaagcaggcccagcggcgggcacagcaaacacctgtgcaactgagtaaggagcaagaagagctgatccggacactcctgggggcccacacccgccacatgggcaccatgtttgaacagtttgtgcagtttaggcctccagctcatctgttcatccatcaccagcccttgcccaccctggcccctgtgctgcctctggtcacacacttcgcagacatcaacactttcatggtactgcaagtcatcaagtttactaaggacctgcccgtcttccgttccctgcccattgaagaccagatctcccttctcaagggagcagctgtggaaatctgtcacatcgtactcaataccactttctgtctccaaacacaaaacttcctctgcgggcctcttcgctacacaattgaagatggagcccgtgtggggttccaggtagagtttttggagttgctctttcacttccatggaacactacgaaaactgcagctccaagagcctgagtatgtgctcttggctgccatggccctcttctctcctgaccgacctggagttacccagagagatgagattgatcagctgcaagaggagatggcactgactctgcaaagctacatcaagggccagcagcgaaggccccgggatcggtttctgtatgcgaagttgctaggcctgctggctgagctccggagcattaatgaggcctacgggtaccaaatccagcacatccagggcctgtctgccatgatgccgctgctccaggagatctgcagctgaggccatgctcacttccttccccagctcacctggaacaccctggatacactggagtgggaaaatgctgggaccaaagattgggccgggttcaaagggagcccagtggttgcaatgaaagactaaagcaaaac

SEQ ID NO: 26 - DNA, 5638 bp, human
gcagctggagtcaggcgctcgcccgtccgccggttggctcgccgggacctcgcgcaccggcggcagagtcccttgcgtggattggcaagcgacgccccacctgccccgagctcaccattttctttcgcgctggctgcagctgacccggcgaagggagccgaccgggccctgggctggaggtaaaaccccacggaaagaacatgaggttcccttggaaatcattcaagaggaagatggaaggggctgtttagaagagcttaaaagctacaggctgtaagactggggcctgagtgctggcagtggaaaacactgttgggctgtgatctctccctgaaaagttccaggtgcctttttgcttcctgcaaaagaaaggaagcgaaagagaagaccatgtccatagccctgaagcaggtattcaacaaggacaagaccttccgacccaagaggaaatttgaacctggcacacagaggtttgagctgcacaaacgggctcaggcatccctcaactcgggtgtggacctgaaggcggctgtgcagttgcccagtggggaggaccagaatgactgggtggcagtacatgtggtggacctcttcaatcggatcaacctcatctatggcaccatctgtgagttctgcaccgagcggacctgtcctgtgatgtcagggggccccaaatatgagtatcggtggcaggatgatctcaagtataagaagccaacagcgctgccagctccccagtacatgaaccttcttatggattggattgaggttcagatcaacaacgaggaaatatttccaacatgcgtgggtgttcccttcccaaagaacttccttcagatctgcaagaagatcctgtgccgccttttccgggtctttgtccacgtctatatccaccacttcgaccgggtcattgtgatgggtgcagaggcccatgtcaacacctgctacaaacacttctattactttgtcacagagatgaacctcatagaccgcaaggagctagagcctttgaaagaaatgacgagcaggatgtgtcactaatgctccacctcaccctttggaagaaaggaaagctgtttcctcctggtgccctgagcgggcaggaggtggaccaccctggctgaaatgacacacctactcccaggaacagcagaggtggaggcaagcagtgactcctgagagacattccccactcactttgtgtgctcttaaccttctgagtgctgctagcccagacctgtggacgaggcagaccacaacgtgaaagaaggaccagccccttgaccgttctggctggggaattgtccacgaggaagcctctgcacttccacacatggcacagttctgcctgtgacctgccgcctaagctttactggaattcagggttttgagactgagatgcgtgtcgtatttttcacttatctgtcttgtcagctggccgacttctctgtgattggttttttaagtgccgagtgaattttggacctctggatgtgcagcaagtttttatgcaataagccttcctttcaggtctctaaaagctcctgctctgatctgtggtttaacactgtgcagggctgtggagctctgagagacctgaacccctacccatcccctgcacctccctactctccctgccgaggcgtccatagcatttccctaataaatagttttatcagggacactccatggggtggcttgtctctgccccaaacagggtcttcacgttctaactgcagggaagagactggttactagcgtaaagctgacaagttaccagttcacctgatcagaatgtattttttataaccaccatcattccttgtctcttcagtggaagatattctttcctgtttcccagaagagagaaataaaagtcctaaataactaagaatgatcagcgggagcgttgggcatgattactgcagtgtttgttctttattaaagacagggagtcgtggctgtctctacataatactaacatttcagtgtaaaaagtacaattggttatttggtacgtgtagatttaacacccagacggctgacttgtaaccctccccactagccttctgagcatttaaacccagccgtcattctctccccactccacgctccccactcctctgccacgttatgttacggcacaaaattaatttctgcccctgtgattgggccacggttgccaaggtaacagtggagctggagctaacttcctcctttcatcctttccaattttctattccagaagacagtcagaataatgcatctgtactacatcctgccttttgaacctaaatgagtttcgttgatgaaatgtgcctctctgattcatcacaaactgtggtgttctgaccacctgtgacgagggggtcataatacttccagtgatccttttaatttagcaaaatatttgtcggtggagggaagtagataagaatgtattagtgtattttaaagtaataatgattaaagaataactaaatgactctgattttgttttatcaatcataatgtgttaaagccctctgtggctgccacaaaagactagaatcatgaaatctttgtccaagctaagaaagggctgtctctgtgggtacagtggcattctctgttgacctaaccaagcagcctgaaccttgctttgtgtctcgtaaaggtcatctcacggaatccaattgctgctacctcaccatgttgctgtgccctggtcaacaataaacatacttttttcccccttcctaagtaactttgagaggacaagataggcaaagttttttccctacatctcttttggccaaaagaatatctgaccatcacagagatccagagaacagaaacaagagcccctaagtcccagcctctgcaatacacagttaccagatgggaatgcagcacagtggcacagagaggtaactacggagcccatgccctggaggaactctgtagctgtgcatcatggaacgccacaggatttttacattaaaaagttgaatatgttcctgcatttcagcagtgcataatcgagcaggaggctggaatctggggacctttgttattcattctttttaaggttattttttattaactgtgcatatgaaatttccactcaatttaaaaatccaaatctttttaagcttcttggaagaatttcctcctgcttatattgttaattgcactaatgaactcttctagggtaaattctggcaaactaccctttttttttttttaatcacagaatattcctgttcccacagaactttggcacattctgaagaaaatctctgcagtcaatttttatctcctctgcttgactgcatctaactgttcatctctgttataaatggagcttcagccctctgggtcagagactgacaaccctccttcttcttcctaacctgtcctactctccttctttttctgctttcattttaattttgggaaattttaaagtaaaagtttcaaagttgaaagattatagtgagtacccttatgtcctttagtgcatcagttgttaatgttttgccttgttttcttttcttcctttttttttttaagagaaggggtctctccctattttacccaagctggccttgaaccccttgcctcaagtgagcttcaaccttagcctcctgagtagccaggactatggcatgtaccaccgcacctgcctcacattttctttctcactgtaaatacacattcttattcttgaaccttctgaaaataagttgcagacatcatgaaaatgtaaaatacttcatcatattctttcttttaataagagcattgtcctataaatctgcaatattttcacgcccatgaaactgaacactgatactgcataaatctaatatatgatccatattcaaaattctccagttgtccccaaaatatcctttatagctgtttatttttaaatccaggatccaatcaagaattatacgttatatgtagttgtcattctcttttgtttcctttaattgattagagttgcccttttgtgtgtgtctgagtggtgggtggtggggtggtgtttgtgtatgatgtgcagtgtgtgtgtgtgtggtgtgtctttcatgacactgacattattaaagagttcaggcaagtttgtggaatgtcccacaatctagacttttttactgattgtttcctcatcacgagatacaggttacattttttttcccaagactgctacatgtgtgatgttgtttccttactactgcctcacctcaggaagcacataatgtctacttgtctcttttctgatattaggactgatcaggtgttgtctgcctgatccaatcattatcaagttccataattcattattaagctctgaaattcaggacacatacatttatagagtgtgaggctgtgcatacgtacattcatcccttaatgttctcaaggaggcccaggatccccaaaatattataagcattgcagtcagatgatatagcactagcaaagcattcatccctttccatataacaggagggaggggaagaaggaagtttccatgtgcaggcaatacgtgagagcatgggcaagtgaggatttgtatgctccctgtagccagaggtgaaatattcaacgcttttattttttctcccgtcttcaatgacctcccatttggacccatagtttatttatagagagcacacactccctaattgtcagatggtttttttgggaaaactcttagatagtacagtgagttgtgaccctccaaaggatcacaagtacataaacagatacaaagtatttatgtggtattaaaaattcatggtgatggtgcaagggagagatgattaggaagaaaatgtcttaaacggctgtaattgagaaatactgatctagagtcatttcctgcttcttaaattgttcgttttctcttccctgggtattttctcatttccaaagacccagagtctcagagccagtttaagtggaagaaactttgagaggtttcttaatcaattccttctatctctcaaaccatgccagtaacttccttggtgaaaaaatctatactcctctcacagttcttcgggcatggaaattctatagcattctttggtataaccaacccactgaaccctccacaacatcttgaattccattcaactcgagctgaagtattctttttgagtttcagtatatcttttctagtgtcccacttttagaaaggtccaaagatgatatataataagtgaaaatacaattaatcagagctttatttgcatatccattaaatatctgaaggctattaccagttgtgcttcagcctcctttcccttgcaattctcccagggtggcatcctctacggagtcttgttgctccattgttgaccactgatgtaactcaacgtgaaaccttcccaaagctctccacatcactctctgttatggctgtgaccagcagtgaacatgaaaagaacttatttcatgccttctccaaactatattgtttctttgctaagtccagacctgctttttctacatttataggttttctattttaatcgccatgcaaaattctttatcatactcaatcattttggtttatcttcctgacttcttacctttaacatccctgttaaagattacactgttgttgtttcagaaaaaaaaa

SEQ ID NO: 27 - DNA, 4221 bp, human
cagcccgagcccgagcccgagcccgagccggcgccaccgcgcccccggccatggcttttgccaatttccgccgcatcctgcgcctgtctaccttcgagaagagaaagtcccgcgaatatgagcacgtccgccgcgacctggaccccaacgaggtgtgggagatcgtgggcgagctgggcgacggcgccttcggcaaggtttacaaggccaagaataaggagacgggtgctttggctgcggccaaagtcattgaaaccaagagtgaggaggagctggaggactacatcgtggagattgagatcctggccacctgcgaccacccctacattgtgaagctcctgggagcctactatcacgacgggaagctgtggatcatgattgagttctgtccagggggagccgtggacgccatcatgctggagctggacagaggcctcacggagccccagatacaggtggtttgccgccagatgctagaagccctcaacttcctgcacagcaagaggatcatccaccgagatctgaaagctggcaacgtgctgatgaccctcgagggagacatcaggctggctgactttggtgtgtctgccaagaatctgaagactctacagaaacgagattccttcatcggcacgccttactggatggcccccgaggtggtcatgtgtgagaccatgaaagacacgccctacgactacaaagccgacatctggtccctgggcatcacgctgattgagatggcccagatcgagccgccacaccacgagctcaaccccatgcgggtcctgctaaagatcgccaagtcagaccctcccacgctgctcacgccctccaagtggtctgtagagttccgtgacttcctgaagatagccctggataagaacccagaaacccgacccagtgccgcgcagctgctggagcatcccttcgtcagcagcatcaccagtaacaaggctctgcgggagctggtggctgaggccaaggccgaggtgatggaagagatcgaagacggccgggatgagggggaagaggaggacgccgtggatgccgcctccaccctggagaaccatactcagaactcctctgaggtgagtccgccaagcctcaatgctgacaagcctctcgaggagtcaccttccaccccgctggcacccagccagtctcaggacagtgtgaatgagccctgcagccagccctctggggacagatccctccaaaccaccagtcccccagtcgtggcccctggaaatgagaacggcctggcagtgcctgtgcccctgcggaagtcccgacccgtgtcaatggatgccagaattcaggtagcccaggagaagcaagttgctgagcagggtggggacctcagcccagcagccaacagatctcaaaaggccagccagagccggcccaacagcagcgccctggagaccttgggtggggagaagctggccaatggcagcctggagccacctgcccaggcagctccagggccttccaagagggactcggactgcagcagcctctgcacctctgagagcatggactatggtaccaatctctccactgacctgtcgctgaacaaagagatgggctctctgtccatcaaggacccgaaactgtacaaaaaaaccctcaagcggacacgcaaatttgtggtggatggtgtggaggtgagcatcaccacctccaagatcatcagcgaagatgagaagaaggatgaggagatgagatttctcaggcgccaggaactccgagagcttcggctgctccagaaagaagagcatcggaaccagacccagctgagtaacaagcatgagctgcagctggagcaaatgcataaacgttttgaacaggaaatcaacgccaagaagaagttctttgacacggaattagagaacctggagcgtcagcaaaagcagcaagtggagaagatggagcaagaccatgccgtgcgccgccgggaggaggccaggcggatccgcctggagcaggatcgggactacaccaggttccaagagcagctcaaactgatgaagaaagaggtgaagaacgaggtggagaagctcccccgacagcagcggaaggaaagcatgaagcagaagatggaggagcacacgcagaaaaagcagcttcttgaccgggactttgtagccaagcagaaggaggacctggagctggccatgaagaggctcaccaccgacaacaggcgggagatctgtgacaaggagcgcgagtgcctcatgaagaagcaggagctccttcgagaccgggaagcagccctgtgggagatggaagagcaccagctgcaggagaggcaccagctggtgaagcagcagctcaaagaccagtacttcctccagcggcacgagctgctgcgcaagcatgagaaggagcgggagcagatgcagcgctacaaccagcgcatgatagagcagctgaaggtgcggcagcaacaggaaaaggcgcggctgcccaagatccagaggagtgagggcaagacgcgcatggccatgtacaagaagagcctccacatcaacggcgggggcagcgcagctgagcagcgtgagaagatcaagcagttctcccagcaggaggagaagaggcagaagtcggagcggctgcagcaacagcagaaacacgagaaccagatgcgggacatgctggcgcagtgtgagagcaacatgagcgagctgcagcagctgcagaatgaaaagtgccacctcctggtagagcacgaaacccagaaactgaaggccctggatgagagccataaccagaacctgaaggaatggcgggacaagcttcggccgcgcaagaaggctctggaagaggatctgaaccagaagaagcgggagcaggagatgttcttcaagctgagcgaggaggcggagtgcccaaacccctccaccccaagcaaggccgccaagttcttcccctacagttctgcggatgcttcttaacaaccgcccggggctgtggctggcagcttggtgggccccagggccttctccttcattctctgtgaacatgtaactcaggaccccttttccctcttgcgtctgtgccagctcaaatccagcccctcgccctgtgccaccccaactgtgcctgatagacctgccccagcgttcctgacttcttgctggcctgtggagggtgaggtgtaattatttgtcacctgaacctaatgtatattctccttgagccccagatcccttcaagctggaagggatggggctgttggtggggtcagggtccaagaggaatgggtgttctgtggcctcgagtcctctcctgtttgcgaaaataccagttttgctctctgtgggacaaagcactgctgatgaagtccccgtgggctcatccgggctggaattcttggtttttcagccattccctgcagagtcactcaatcatcaagtccctcacagccatttctgttcccagaggagccaggcctgcagctggctgctcaggagatggcctcattcctcctgttctcccagtttgctttccacttaagacaaagccttgtctatgtggggggcggggaccggggaaagagggaggctgaaatgtttattctgcttctcccgtgtttcatgccatctcgcgtcccccttcctgcacatgggtgtgaatgcacacacatacgcgtacacacaggacttggtctgctggcctggcctcttctgcccaggtgggttggaacacgtttgctgcctgagcctgtgccactgagcatgttaggtggagcagttggtgtggcacgtgcggggtgttggcaccggaggcatggaaaagcacaggctgtactgccaggctgcgatgcgtgctggcccccgcacaggctcctgtgtgcagggactgattcctcagcacacgaggcttccacaacccagtctgctccatagcactctggcccaccctgtctgcaggtgaaacaggagggctgtttgcctctgccccatccccccgactgtgttcaggagtcccaccttgcatttcagacctgggctggcagtctgttggacttctcttcaggaagaaaaagcatcagggggaaatggaatgcccctgccccaggaacatggcagaagcacaggttctgtacctcagatggactcctgctgggccttcggggtctcagttggcttcccccagattctgattctacagctgcagaatgtatataacacaataaaagcaaatgtttgaaccagt

SEQ ID NO: 28 - DNA, 1940 bp, human
ggggcggtgcagaggcggcaggaagatggagttggggagttgcctggagggcgggagggaggcggcggaggaagagggcgagcctgaggtgaaaaagcggcgacttctgtgtgtggagtttgcctcggtcgcaagctgcgatgccgcagtggctcagtgcttcctggccgagaacgactgggagatggaaagggctctgaactcctacttcgagcctccggtggaggagagcgccttggaacgccgacctgaaaccatctctgagcccaagacctatgttgacctaaccaatgaagaaacaactgattccaccacttctaaaatcagcccatctgaagatactcagcaagaaaatggcagcatgttctctctcattacctggaatattgatggattagatctaaacaatctgtcagagagggctcgaggggtgtgttcctacttagctttgtacagcccagatgtgatatttctacaggaagttattcccccatattatagctacctaaagaagagatcaagtaattatgagattattacaggtcatgaagaaggatatttcacagctataatgttgaagaaatcaagagtgaaattaaaaagccaagagattattccttttccaagtaccaaaatgatgagaaaccttttatgtgtgcatgtgaacgtgtcaggaaatgagctttgccttatgacatcccatttggagagcaccagagggcatgctgcggaacgaatgaatcagttaaaaatggttttaaagaaaatgcaagaggctccagagtcagctacagttatatttgcaggagatacaaatctaagggatcgagaggttaccagatgtggtggtttacccaacaacattgtggatgtctgggagtttttgggcaaacctaaacattgccagtatacatgggatacacaaatgaactctaatcttggaataactgctgcttgtaaacttcgttttgatcgaatatttttcagagcagcagcagaagagggacacattattccccgaagtttggaccttcttggattagaaaaactggactgtggtagatttcctagtgatcactggggtcttctgtgcaacttagatataatattgtaaaatgcttttcaagtgtgggttttgccctgattgttgcaaatacaatttccaccttctggaaaggtaggtttgctgtggaggaaataatgtactagatcattgtcacagaaaaaccaactatgatttatggttgtgttttcagaattcaacattaaagattaatgtttatttaaacgaacacattcctgcattcaggatgtgaggccatttaataaaaagggcacaaagcctgtcagagttttcaacggtgcttatagctgccagctggattccaaacaggtaccacattgtctctgagctaatgtttatatttttccattcaggcaccgaaatagttaatatttgaaataagtcttcaaaagaaaacataagagattattgagttcttgggactggatcctttatttcataagttcagatcatcttaaatgaaaatgccatgattatctgcagttaagtagatgacagctattctacatcagacttgatttttgtcagctaattacataattggtaagctataattgaaaccttatggcttaaaattccttaactcctttttgattcatgtttgtagtcatgttgtcaacagaggcaaagttaagcttgatgatggttaaaatcggtttgatagcaccatgggacatttttctaacaaaaataaatgcatgaagagacatagccttttagttttgctaattgtgaaatggaaatgctttacaggaagtaaatgcaaattacttttaagtgtgctttaaagaaaaatattttccccacaagagaaatttaaataaagaattttatttgtttaaaaaaaaaaaaaaaa

SEQ ID NO: 29 - DNA, 2367 bp, human
gcggccgcgatggggccgaagcgcccgaagccccggagcccacaaactgccgggcccgcctcgccgccgggacccgggtgcctgggctcggcttgaagcggcggcggcgcaccggcacagccgcgggagcatgggcaggaggatgcggggcgccgccgccaccgcggggctctggctgctggcgctgggctcgctgctggcgctgtggggagggctcctgccgccgcggaccgagctgcccgcctcccggccgcccgaagaccgactcccacggcgcccggcccggagcggcggccccgcgcccgcgcctcgcttccctctgcccccgcccctggcgtgggacgcccgcggcggctccctgaaaactttccgggcgctgctcaccctggcggccggcgcggacggcccgccccggcagtcccggagcgagcccaggtggcacgtgtcagccaggcagccccggccggaggagagcgccgcggtgcacgggggcgtcttctggagccgcggcctggaggagcaggtgcccccgggcttttcggaggcccaggcggcggcgtggctggaggcggctcgcggcgcccggatggtggccctggagcgcgggggttgcgggcgcagctccaaccgactggcccgttttgccgacggcacccgcgcctgcgtgcgctacggcatcaacccggagcagattcagggcgaggccctgtcttactatctggcgcgcctgctgggcctccagcgccacgtgccgccgctggcactggctcgggtggaggctcggggcgcgcagtgggcgcaggtgcaggaggagctgcgcgctgcgcactggaccgagggcagcgtggtgagcctgacacgctggctgcccaacctcacggacgtggtggtgcccgcgccctggcgctcggaggacggccgtctgcgccccctccgggatgccgggggtgagctggccaacctcagccaggcggagctggtggacctagtacaatggaccgacttaatccttttcgactacctgacggccaacttcgaccggctcgtaagcaacctcttcagcctgcagtgggacccgcgcgtcatgcagcgtgccaccagcaacctgcaccgcggtccgggcggggcgctggtctttctggacaatgaggcgggcttggtgcacggctaccgggtagcaggcatgtgggacaagtataacgagccgctgttgcagtcagtgtgcgtgttccgcgagcggaccgcgcggcgcgtcctggagctgcaccgcggacaggacgccgcggcccggctgctgcgcctctaccggcgccacgagcctcgcttccccgagctggccgcccttgcagacccccacgctcagctgctacagcgccgcctcgacttcctcgccaagcacattttgcactgtaaggccaagtacggccgccggtctgggacttagtgtcaccgggaggaaaagagagagatctggggctggggtatggatgatggggggaagggcggtcgcctctgccactgtcagggaccagccggccaacgcccacccgcaaaggtgtctaaaaacttcagcttttcacccacctgcccctttctttcaatcccacgctgtttcctttcaaagttctgggaggacgaactcaccgaggcgagaagtgtaacattctctccacccagcttataaaaggattctttactgtgccagcacggggattggatccgaagaaactggctactggggtttggcccccgagtggccgtccctgtgggagatgcaccccattcttgggcccccctcattccctttccgaaaaaggaaaacttgcgtttgagccgttgagctaattctgcaattttctaccaaacagagcgctggtggccccggagcagggctgtgacattggctggtggagccccttcctgtgttctccctttgttccagcgccgcgatggtgagatcactgttccaagcagggggacggctcgcgataggacaaagagagcaggacctccagactctggggagccctgcagaccttgacaatttgcctgactcattcctgacctcttgtcattttggcctgaaggctacaaattcagggtcagctgtatgcactaagtcaaataatgaatttcttcctccctctcgcaaccgaccaaaattttgacaacgatgatgttcaccagaaggaaaaaaaaatcagttttatgcactttattttgttttgattttcattttttattaagaaaaaattttattttacagaatttaccttctctgtatatatgtgcataaagtgtggtgtaaatatactaaacaaacttatatttcaataaaagggagtttaaaatttaaaaaaaaaaaaa

SEQ ID NO: 30 - DNA, 548 bp, human
tttaatttataaatcagtttatttgcagattttatctttcttaaagtatatttcagttaacaaatctatttacacaggtatacatgggaattcatcccagttattttacagatcgtacttacaaaccacacccttaagtgttcggtgcaaaattgcactggatgtgactattggctgaaaatggcctgatgaccaggctatttacacgcacacagtaaacgggtttattttttcatgtctgcacagtacagtacacacaaggaggctgaacctcccagagaatgctttgcaatgtgtttgccaagaaggctttgcaaagtccagaaggaaaagctattaaacataggttaattaaaatgacagtacctcctttacatcagtttacattttttcttcacatttttataatacaaagatattttattgaattgctgcacaaccagttgaagatgatttgtaaacatgtaaattcctacaatttgcattaaatgtcattgtagtttctataatttgctctttgaattaatgttttattcactagtattctt

SEQ ID NO: 31 - DNA, 654 bp, human
ggatgccaagttcttttagtaattcaccagctccatgcagggacatcacagggctgccctccatgagcagaggaggagggctgcctggcagagcgtttcacactccaggttagccagaaagagcatcttcatttttgtttccacacaacacttctctgtgagcctgttggccaacaaagtggcggccgattgttggaggagccacccaaccatcttggctaaccttaaattcttcagggctagaatatgttcaccccagaggcttagatgaagcacatttgcggctactcgggcagatggtctcttgctggcctctcgctggagcagtgccctcaccaactgtctcacgtctggaggcactgactcgggcagtgcaggtagctgagcctcttggtagctgcggctttcaaggtgggccttgccctggccgtagaagggattgacaagcccgaagatttcataggcgatggctcccactgcccaggcatcagccttgctgtagtcaatcactgccctggggccaggacgggccgtggacacctctggggccatcaaacagccgttttcgccccgatccacgtaccagctgctgaaaggcaactgcatgccgatgctctcatcagccagacagcaacccaaatctgcgatcaccag

SEQ ID NO: 32 - DNA, 611 bp, human
  misc_feature (449)..(449): n is a, c, g, or t
  misc_feature (480)..(480): n is a, c, g, or t
  misc_feature (529)..(529): n is a, c, g, or t
  misc_feature (549)..(549): n is a, c, g, or t
  misc_feature (557)..(557): n is a, c, g, or t
  misc_feature (593)..(593): n is a, c, g, or t
ttttttatattcgtaaacatagcattttattaacaaaatgtttacacctttcttacaacaaaacagtgatttagcatgttatactctataaaagtgtattatagaatattcaagctaaaacaatattatttaaaagtatggcaaatcaactttcatttgcaaactatctactatgagcataggcatgaaaacaaaaatcttacaacaaaaaacaaaaggtctagttttcttttgtcagcatctataaacaatacagacatcatatggtttacatacacttaggtccagcccaaggttaagactgcaaaaataaagtcttcaaacatccacagaagcttggcaaaccaccactgcagcattccatgacaggtaaccaggccatgtgtcatgcagtaagtccaaggccataaatttgggctgtttataatagtgctccaaagcggccaaantgtaagcactgaattttcttccgtaatagantattataaaggcccaatacttattcttcacaggcttgagaagctgcatnttggagaagagagatctggnagcgcttnctttttttgaaagctaggcatgcaagtgttctcagnttaattggcttccgtaca

SEQ ID NO: 33 - DNA, 4515 bp, human
ggtcagcgcccaggtcctgggctggccgccgggatgttgccctacacagtgaacttcaaggtgtcggcgcgcaccctcacgggggccctcaacgcccacaacaaggcggcggtggactggggctggcaaggtttaattgcttatggatgtcattcacttgtggtagtgattgattccattactgcccaaactcttcaagttttagaaaagcataaagctgatgttgtaaaggttaaatgggccagggaaaactatcaccataacattggctcaccatattgcttacggttagcttctgctgatgtcaatgggaagatcatcgtctgggatgtagcagcaggagtagctcagtgtgagatccaagagcatgccaagcctatccaggatgttcagtggttgtggaatcaagatgcttcccgcgatttactgcttgctatccacccgccaaattacattgtgctctggaatgccgacactggcaccaaactatggaagaagagctatgcagataacattctttctttttcttttgacccttttgatccctcacatttaactttgcttaccagcgagggtattgttttcatctcagacttctccccatccaagcctccctcaggccctgggaaaaaagtttacatatccagcccacactctagcccagctcataacaagctggccacagccacaggtgccaagaaagctctaaataaagtaaaaattttaatcactcaagagaaacctagtgctgaattcataactctcaatgattgccttcagttggcatacctgccttcaaaaaggaatcacatgttgttgctctatcctcgagagattttaatccttgaccttgaggtgaatcagacggtgggtgtgattgcaatagaacgcacaggagttccatttttacaggtaataccctgctttcagcgtgatggtttattttgtctacatgaaaatggttgtataactttacgtgttcgaagatcttataataacatttttaccacttcaaatgaggaaccagatccagatccagttcaggagcttacctatgatttacgaagccagtgtgatgcaatcagggtgacaaaaaccgtccgtcccttcagtatggtgtgctgtcctgtcaatgagaatgcagccgccctcgtagtgagtgatggcagggtcatgatatgggaactcaagtctgcagtttgtaatcgaaattcacggaacagtagttctggtgtgtcacctttatattcaccagtgtctttctgtggaattcctgtaggagtgctacagaataaactcccagacctttccttagataacatgattgggcaaagtgcaattgctggggaagaacatcccagaggttcaattctgcgggaagtgcacctcaagttcctgctgacgggactgctttcaggactgcccgcaccacagtttgctattcgtatgtgtccaccgttgaccacaaaaaacatcaagatgtatcagccactgctggctgttggtacaagtaatggttctgtcctggtgtaccatctcaccagtggtctgctacacaaagagttaagcatccactcatgtgaagtcaagggtattgaatggacaagtttgactagttttctttcttttgctacctcaacaccaaacaatatgggattagtgagaaatgaacttcaactggttgatcttccaacaggtaggagcattgcttttcgtggtgaaagaggcaatgatgaatctgccatcgaaatgattaaagtatctcatttgaagcagtatttggcagtcgtattcagagataaacccctggagctatgggatgttaggacttgtacccttcttagagagatgtccaaaaacttccctacaataactgctttggagtggtcaccatctcacaacttgaagagcctgagaaagaagcaacttgctactcgagaggccatggcccgccagaccgtagtctcagacacagagctgagtattgttgaatcatctgtgatcagcttgctgcaggaggcagaaagtaaatctgaacttagtcagaacatctctgcccgggaacattttgtatttaccgatattgatggccaagtgtatcatctcactgttgaaggaaactcagtaaaagacagtgctcggattccaccagatggaagtatgggtagtattacctgcatcgcttggaaaggtgatacattagtgcttggagatatggatggaaatttaaatttctgggacttgaaaggcagagtatccagaggaatacccacacaccgaagttgggtgaggaagattcgttttgctcctggtaaaggaaatcaaaaattaatagcaatgtacaatgatggagctgaagtgtgggatactaaagaggttcagatggtgagcagtttaagaagtggcagaaatgtgacctttcgtatattggatgtggactggtgtacgtcagataaagtgatcttggcctcagatgatgggtgcatcagagtcctagagatgtctatgaagtctgcgtgctttagaatggatgaacaagagttaaccgagcctgtgtggtgcccctatctccttgttccaagggcctctcttgccttgaaagccttcttattacaccagccttggaatggacagtattctttggacatttctcatgttgactatccagaaaatgaagaaataaagaatctcctccaagaacagttgaattcattgtctaatgacataaagaaactgttgcttgatccagaattcactctcttgcagaggtgcctgcttgtttcaaggctctatggtgatgaatcggagctgcacttctggactgtcgctgcccactacctgcacagcttatcccaggaaaagtcagccagcacaacagctcctaaagaagctgctcctcgagacaaactgagcaacccactggatatatgctatgacgtgctctgtgaaaatgcctactttcagaaatttcagctagaaagggttaatctacaggaagtgaaacggtcaacttatgatcatacaaggaaatgtacagaccagctactgctcttgggtcaaacagacagagctgtgcagttgctgttggaaacaagtgcagataaccagcattattactgtgattcactgaaagcctgtttagtcactactgtcacctcgtcaggcccctctcagagcaccattaagttggtggcaacgaatatgattgccaatggcaaattggcagagggcgttcagttgctctgcctgatagataaggctgcagacgcctgccgctacctgcagacatacggcgagtggaatcgggctgcatggctggcaaaagtccgtttgaatcctgaggagtgtgccgatgttttaaggcggtgggttgaccacctttgttctccacaagtcaatcagaaatcaaaggctctcctggttctcctctctctgggctgcttttttagcgtggcagagacgcttcacagcatgagatactttgatagagcagccttatttgtggaagcttgcctcaagtatggagcatttgaagtcactgaggacacagagaaactcatcactgctatatatgcagattatgcccggagtttgaagaacctcggttttaagcagggagcagttctctttgcttcaaaagccggagcagctggcaaagacttattgaatgagcttgagtcccccaaggaagaacccattgaagagtgacagcttaataaatgccagggaatctgacctggaaggcagatgggagggggctggtctggctgtggccaccgtcacagtccaggatgaagaggagtacagggtcctgtgagctgtttgaccactgttctaagactatgtgtgcccaaaagcacataagcatctatgttgagagtaagtttgtatcctgcgttggtctcagaaagaacgtgaatgcttaagattttgaaagtacataatattttatactttgggagagagctttaagagtccctggaaatactttttaatttttttaacttaaaattcaagagactgaatcacttttctcattgattaaatgtaaagattattgagaaacctatagtaaatgaaatttgtaagatgttttctcaaatatatgctgtgcctgtacttatatacagtctttcaagagagatacaaacaaggcagaaacatttaaactagtattaaaggtagtttaccaaagcattttttgttttcttaccttgaaaacacagaaccgttaattccttggtttaagcagttgctaagttttttaattttaggctcagaggcccataggaggttttaagatttatgtttagtccgataggtgaggtctttgatattttgaattttaactccttttatgatacatcacagtaacctcatttttgaagtctttctttgtactttaatgttctctctgttctaatagttgaagtatgagatgtaactattataaactgttgctgaaaacataaatgtctgtaacttacaaacatgataaataaattaaaaattcca

SEQ ID NO: 34 - DNA, 175737 bp, human
gatctgcccgcctcagcctcccaaagtgctgggattataggcgtgagccactgcgcctgacctttttttttttaaatcttttgagagagacgtagtcttgctctgtctcccaggttggagtgcagtggcgtgatctcggctcactgcaacctccgcctcccagattcaagcgattctcctgcctcagtctcccaagtagctgggattacaggcacctgccatcatgcccagctaattttgtatttttttgtagagacggggttttactgtgttggccaggctggtcttgaactcctgacctcagatgatctgcccgcctcggcctcccaaagtgttgggattacaggcgtgagccactgcgcctggcccacacatttttaggttataaaattaaacgtaatatggccaggtgcggtggctcacgcctgtaatcccagcactttggaggccaaggcgggtggatcgcctgaggtcaggagtttgagaccagcctggccaacatggcgaaactctgtctctactaaaaattcacaaaattagccgggtgtcgtggcgggggcctgtaattccggcaacttgggaggctgaggcaggagaattgcttgaacctgggaggcaggggttgcagtgagccaagactgtgccattgcactccaacctgggcaacaagagcaaaactccgtctcaaaaacaaacaaacaaacaaaacataatatgagactggacacagtggctcatgcctgtaatcttaacagtttggtaggctgaggtgggcagatcacttgagcccagaagttcgaaacaagccatgtcacccatgacatggcaaaactctgtctctacagaagatagaaaaattagccgggtgtggtggtgcatgcctgtagtcccagctactcaggaggctgaggtgatcctcccacctcagcccaggaggttaaggctgcagtgagctgtgatcatgccactgcactctagcatgggcaacagagtgagacccggtctcagaaaaaaaaaataataataatcaaatatatttgtgtaatacagatctactaatgggaagaactgaatttctctttttgaggttaacattttgcctaattgatgtacaaagttagtgttccagatggtcaaatttgactgtagatattcatgttcatgctgatctgtagagattgcaagtatttcatctttgaaaacatcttttcacacaggtaatgataggtgatatgtgaggtgcttgaaatgctgtgaagcacttacgactgtgtcactgtgacttgtagtgtacaaagcagcagtgcaaatcaggatgctgtagtcgctgtcgtgaccactcggctgtgtgttgtagagcaaaagcagccacagtattaagtaaatagtgtggccccgttccaataaaactttatttgttggatattggaatttgaatttcatacggttttcacagtctcaaaatattcttttgattttttttcaaccacttaaaaatgtaaaaaccattcttggcttgtgggctatacagaactagatgatgggccaggtttggcccatgggcagtagtttaccaagccttggtttaaagccctcatataagctgttgtagacattaagatgagttaaggcatatagtttagcacagcgcttagcaaaatagggagcgctgtgttcatcattgtcattcaagatgatcgttctctccaggtctggctgatgtgaggggtggaggtggtgtctgctttggatttctgctgttcctgagggagtatctgcattttccacagcttttctgtctgatttgtattttcctctgattccttttgtcatcaggtattcactgggcacctgctgtgggcagggctctgcgctgaggttctggagacaaaaggatgaatcgttgagcctgccctggtgtggtgctcccgttatcctttaggtataaaaacttgtggctattttttttttttttttgagacagagtcttgatctgtcacccaggctggagtgcagtggcacaatctcagctcaccacaacctctgccccccggggttcaagcgattctcctgcctcagcctcctgagtagctgggattacaggcgcccacgaaccacgcccagttaattttttaatgtttagtagagatggggtttcaccatcttggccaggctgatcttgaactcctgacatcgtgatccacctgcttcggcctcccaaagtgcaagtgttgggattacaggcgtgagccactgcacccggccatggctatggtttttgagaatgattggccaggtgatgcatttatttattttattactatttttcgagacggagtcttgatctatcacccaggctggagtgcagtggcgcgatctcggttcattacaacctccgcctcctaggctcaagtgattgttctgcctcagcctccaagtagctgggagtacaagtgcatgccactgcatgcgctaatttttgtatttttagtagagatggggttttgccatgttggcttggctggtctcaaactcctgacctcaggtgatccacccacctcggcctcccaaagtgctgggattacaggcatgagccaccacgcctagctcaggtgatgccattagtttctacacagttatcctctgtcatcccagactcaatgtgtccatcactggataggtcaccgcctcctaaagtttctcttgacctgctctcatctcccagaattttcctgtcacccagaatttgactcaggtacacaccaccacacctggataatttttctattttttgtagagatggggtttcaccatgtagcccaggctggtctctgtcttgaactcctgggctcaagcggtcctcctacctcaacctcccaaagtactgggattacagagtaattactgtgagccaccacatccagcttggccaccagcttattcaaagtctccaggatgctgggaccaccccccccaccacccgctccctgtttttgcataattgtatcttttttttttgagacggagtctcactctgtcacccaggctggagtgcaatggtgtggtctcggctcactgcaacctccacctcctgggttcaagcgattctcctgcctcagcctcctgagaagctgggactacaggtgtgtgccaccacacccggctaatttttgtatttgtagtacagatggaatttcaccatgttggccaggctggtcttgaactcctgaccttgtgatccacccgcctgtcctcccaaagtgctgggattataggcgtgagccaccgtgtctggcctttgtaattgtatctttgtgaatgagtgatttggttctgccctttttactccatatttataccagcctggctctaggagagtcagaaggcctgcccaagggtttctgccctctctgggccactgggccaaagctgtagcttgccctccgtgggctacctgggtcagccactcctgtgcttagggcttaatcactagttcgctgaggcctgaagtttaatcaacaccttgaggctaaacagctctggtccttgtgatcttcagcccatccctgcttttctctggtcctcctcaggagcttgtcaggccacgggggctccagtgatgaggctgaccatctttcttaagaggtgttctggtagcttgtattatgattggattgcgttgacttctcaaagccgaactgctgcttactagtagtacagtagactcccatttggcactgggctggtctttacccaggggtcccatagatgggtgtgtggaggggagaagagccagcatgcatccttgagttgttagttcaccaaaggatgtgaccctgtgttccacgagcgctcggtaattcctggtttgcactgatggcctttctctttggtaaagtcagggcgctgattatcttgtcggaagtatccagctggtcctctcttgggctccatcactgtgcaagtctctgctcataagaactcttcagttcccttctcctgggttcacagccaaggcaaaaaagagactccttggcctcttggcaaacatacatcccctacctggctggtcccccttcagcttccctctctaaggaacaacttgaacatagaaactccaacctcacctgtaatcccagcactctgggaggccaaggtgggcaggtcatttgaggccaggagttcaagaccagcgtggtcaacatggcgaaaccctggctctactaaaaattagcggtggtggcgcatgcctgtaatcccagctacttgggaggctgaggcacgagaatcacttgaaccagggaggcagaggctgcagtgagccagggtcatgccactgcactccagcttgggcaacagagagaccctgtctcaaaaaaagaaaaggaactccaacttctgaaagtaaacaacttatgcagtacatgattcctggagaggatttggtcaccaaccttccctccttccttccagggaaagcacacagaggggcagggcaagggcctccagtgcattacttcaccacttccctgagtaggtcttctcaagtccttggagccttcactttgtgatttgtcactgccagagagcaatgttgggatcatgagctgtgggtcctcagtctgactttaaagaaacctcacaaattgtctgctcctgattttcctgaccatgtttcccaccaatcctaacaaacctctgcttccctctcagtctcaacactctggtgttaatgcatttgaacctgctgtgtatctacttcctgtaattttttgagaattatctagaatggctcaaatcccacctttcccatgaagcctttctgaccactgcacatgctccttccccttgctgggctgtgtgctgcatgtgtgtacagggggacatcacatttgggtgcagcctgtcgtgtgggcgttccttttgacgcccgtgtcttgagagggctgtgtggtgttagcaggttagaggcagatgctaaagagacaggcctgaccattcactgacctagctttcctttccctgagcttcagtttcctcacctcttaaagggaaataaaaatagtatgagttgtgtgcagcttaactgagaggatgcctgtggagtgttcagggtgatggcagtggttattactattaatctttttctccccagccagacttgatgcctggacttggccacagcttgcttggtaaacccatttactgacatattaattgatccctcttctctcaccaggtacatggccacctctggcctagaccaccagctgaagatctttgacttgcgagggacgtaccagcctctgagcactcggaccctgccccatggagcagggcacctggccttctcccagaggggactgctggtggcgggaatgggtgacgttgtcaacatctgggcagggcagggcaaggccagcccaccctcccttgaacagccctacctcacccaccggctctcaggccctgtgcatggccttcagttctgcccctttgaagatgtgctgggggtggggcacactgggggcatcaccagcatgctggtccctggtgagtgggccaggggatggggcttgaagtgaatgaactctgggtggaagtttgggccagagacatccaggaactgggggcttagttgggctggagctgttggactgaggttcttccttatggctccatgcttctccctccctcccttcaggggccggtgagcccaacttcgatggcctggagagtaatccatacagaagccggaagcagcgccaggagtgggaggtgaaggccctgctagagaaggtgaggctcccctgctggagagggtgagatcccccccattgctggagagggtcaggttcccccgtcctggagagggtgaggttcctccttcctggagaaggtcaggttcccccctgctggagaaggtcaggttccccactgctggagaaggtcaggttcccccctgctggagaaggtaaggtttcctcttcctggagagggtgagattcccctctcctggacggggtcaggtttccctctgctggagagggtgagattccccctgctggagagggtcaggtttccctctgctggagagggtgaaattccctctcctggagagggtcaggttcccccctgctggagagggtgagattgcccctgttggaggtgaggttcccctgctgcagagagtgaggcccctgctgctggggaaggtgtggtttggggttggaggtagagaaagctctcctgatgtctcatgctgggggtcttgggtagaggggttcagcagcctccctggcttctctttttggtgctaccctcctgtggctccttgctgagtcctgtccctctgtgacacccccaggtacctgcagagcttatttgtctggacccacgagccctggccgaggtggatgtcatctccctggagcagggaaagaaggagcagatagagaggctggtatggagcaggcccctgaatgcccaggcccgtcttctcccccacatcctctccccaccatggcttgtccccagaagtgcggccagcaggtgggtgctgccagttccctgactccgaggctgtaacagatatcactcctgtcccctccctcagggctatgacccgcaggctaaggctcccttccagccaaagccaaagcagaagggccgcagctccacggcaagcctggtgaagaggaagaggaaggtcatggatgaggaacacagggtaaatgagcattggcatgggccgggccttccacaggctgcaccctcctgcttgtgcctctgcccttgtcagcctgccacttctcactctgtgcctgtgtcctccccgtctccggtccccaggacaaggtccggcagagccttcagcagcagcatcataaggaggcgaaggccaagcccacgggggcccggccatctgccctggacagatttgtgcgctgagccagactccagggttgcctgggaacagtctctccccaagatcacctgtagggaaatgagtgttccctggaacaaggaggtgggggcagtgtggccccttccccaactgggggtggacagctgtctcctggggtgggttggtattaaagaggaaagcgattttttggataatgtgtctggatcatcttgtggacctgttcccctcccccttgccaagcatgaggccattctaggatcggaggggtcagtgtcctgcctctacccccaccccataccttgtggctgctgtggccttagctttgccttttaggggccttcctcctcagagaggctgtcctctctcccatgtccctggagatgtccttcccatgcagcagggtctggcagcctctgggctctccaggtttgtggtgttctgggggtcctggtgaagaccacactgcactcgaagaagtggagacaagtttattgaggagcttgacacccctcttctgccctagcttgagagaacaactgcagcatttttttctttttctcttcccgatgaccatcttttgggctggcgggccaggcccctgggtgtctcccatatcgctgtctttagtgagactgaggatctggtataaggaaacagatcagctgcagccagtgagggcccctgcgttgggcctgggagagagaaggtcctgttcctgcctttcctgtggccccaggcactctcagctctgaagccaggctattgctcgacaccgcaggatgcccaggactccctggaaccaggagcaaaagggcgcagtcctttccccgtcagagccacccaccagcttccaggcttcctgcatcttccaggggtccagcctgtgggacgtcagcaggaatttcccatagcagcaccggtctagcgggtagtgggtggcaccagccagcttgacacactgtgttggggcgaggcctcctcgtcgggcacttacccccacaaagacatcctctaatgggagaaggggtgcccggctggccaccttgagaatgagctgcacagcagacgctgacagcacataccccgtgcctgaggcatagggtggaaaggggccccaggtgtgaggccactgctcctctgatacgcggtgcctgccccccggtgtccgagaggggttcacgcgccagtgcacccggcccaagtacagaagaggcacttcctcgctgtgcaaaacctggcctccttcctgctcagcctctctctggggttccgtgcttctctcccattgcccccaacggccccctcgcaagaccagctctgataccagttcagggacgttgacatacacatcatcgtccgtcttgaggacgtatcgggccatggggcagtgtttctcagcccagttcagcccgctgagggtctttagggtgaggttgcggtaggagtcctggaaggcggcctgcaagatatccccctgggctgctgactccgaggccaggtcactcccctgggaaccccacacggggtgctgtgcgttcggctctcccagcaagaatagcgtctgtaccctgagcccccgggcctcgcgcagcccgccccacgaagcccgaatggcgtttctctggttcaggttctccggagccgtgcacaccaggatgagcaggaagggaggggccccgggaccactgcaagcttcctggttggggatcaagaggcggggcagggccaggggcggccccggtgaggcgggggctgggagcagggaggctagtgagaggctcagcagctcctcccccaaccccgaaggcccgaagagggtccagacgatcaccagcagcaaagcggcgagaaggaggcgccggaagagcctgagctgcatggtgcggcgtactccgaggggatccgtaagagcgaagggcggagactagctccccgggcctgggtcacggccggggacttaaccgaccacgcccgggatgcggaggtctgagcgcgcgaccgggaccagcgcaccctggggggcggggagaggcggtgcagctgcggaccgcggtcgaggcatgctgcgggggtggctaccttgtcgccgcggcctcgccgccagcaagctccgctccatggctggccgactgcggcactcacggcccctcccccgcctcgccccggcggccggtctgccgcccgcttccgcgttgcgcgctcccatccccgccggaagcggcgtcggagcagcgcggcagggcgcggaaacccgggcgggtggagtggcaccaaacggagtgagaccggtctgtccagccgctccccatcccaacccaccgacgtactccaccagggagaccacacccttcataaccaacgtccgcgtttttgcctttgttgcttcggtcacagcccgaaggattttcccttatgactagatgaccccttaaaagaaaacaaaaacaaaaacaaaaaaacccagagtgaccaagacctgcaaactcaccttaactgcaactggctaggctcagctaacccactccacaatgatgctgcacaccaaccccagggtgttggtctctaaactggtctgggtcagcccctcaaggctgaactgttttaccctcacatttctctttacagagagggacatcactagctacatatagggagactggggggtctgcagcatcaccactgctaaaactaatagcactgtgtgggcaactgagtagggcagctctaaatggaaaaaggacccagcactttaacattccctattagaatggacagaaaggacaggaagccataggtatataaactatttattaacagacaaggcctacagacttatttcttcttggacacacccacggtgcggccacggcggccagtggtcttggtgtgctggcctcggacacgaaggctgcaggtaaaaagagaagagtcacaggtcatgcacagcagaaacaaaaggttggggaaaaagaagagcgagtaggaggaatgctgagtcgaggtaggcagggagatgagaccccccactcacccccagaagtgacgcagccctctatgggcccgaatcttcttcagtcgctccaggtcttcacggagcttgttgtccagaccattggctaggacctggattcagaggagggggcaagggatgttttatcccctgacctcctatgcccaattctgttaggaccctccacccttcctctaatcctgccctcatttcagtacacacctggctgtattttccatcctttacatccttctgtctgttcaagaaccagtctgggatcttgtactggcgtggattctgcataatggtgatcacacgttccacctggcaggcagaccaaggtcagatctagatggacccctttctgaggctgaccccacccccagcccccttccttgtcctcacctcatcctcagtgagttctcccgccctcttggtgaggtcaatgtctgctttcctcaacaccacatgagcatatcttcggcccacaccctgaatgaagtgaggggtttcggaattagtgttgaatctgatttttaaattcctttatagcctcattcaaaaagctcacaaaggtaggatctgcaataatctattttgcaatcccctaggtcaccctttcctcacccacctttccagatataaaccgttcgacagaaggttaactttgggccggtcgcagtggctcacgcctgtaatcccagcactttgggaggcccaagtgggcagatgacattgagggcaggagttcaaaaccagcctggccaacatggtgaaaccctgtctctactaaaaatacaagaaaagttgctgagcatggtggcaggtgcctgtaatcccagctacttgggaggctgcagcagaatagcttgaacctaggaggtggaggttgcagcaagccaagatcacgcaaccacactctaacctgggcgacagtgagaccccgtctcaaaaaaagaaaaaagtaactttgttcaggggtatgactgaatcatgaacacagaatttagtattacagacaaccctttgaaagcaggcagtatcttttttttcccccattgctcagcatatgtagttgtcactaagtgccttctgattcttgcatttaggagaacaaggggcctgccactccaagctgatgcagtaaaccagggtcttatgagttacaggctttgattaaggtattgggctgtcagttcctcagaatctctaagggtcacaattatttaggcaaatcactgtatccccataatcaaagtattccaagatcacaaactcaattttgtcagtgcccagaactgactgcccaagttattataaaaagaaactaatgcttacattggtagcatcacatcaacaccagcactagcacccatgccatctgaactcatgaaccaaagtgatttggagagtgaaggaggaactgaatactgagccctgcccctcattttgtccaactagaacatcagaatgtggccctatttggaaataaggtcgttacggaaataattaggtaaaatgacgttatatttgattagggtgggctctagatccaatgacaaatcatgagagagacacgaagaggaccatgagatgacagcaacagattggagtaatgcagctacaagccaaggaacactaaggattactgacaaccaccagaagacaggaagaggcaaggtaggattcttaagtgcctccagcgccaagagtaattttctgcttagtttatatgaacttgttacagtaggctccaggaaactaaaacaaatggcagttcctatctgcaagaaagagatcaagggttggcttcaccgtggctcatgcctatatgcctgtaatcccagcactttaggaggctgaggctggaggatcactgagcccaggagttcaagaccagcctggacaacacagcaagatccagattagccagatgtggtggtgcacacctgtagccccaactacttggaaagttgaggtaggaggattgacttgagccctggaggtcgaggctgcagtgaagagtgattccgccactccagcctgggcgacagtctcaaaaaataaatgtggctgggtgcagtggctcacgcctataatcccagcactttgggaggctgaggtgggtggatcacctgaggtcagaagtttaagaccagtttgaccaacatggtgaaaccccatctcttctaaaaatacaaaaattagctgggcgtgtgcctgtaatctcagctacttgggaggctgaggttgcagtgagataagattgcaccattgcactccggcctgggtgacggggtgagactctgtctcgggataaataaataaacatgaccaagggtcaaattattaggttgattcagaagagagcagggtctttcaaatttattaattaaatgacgaggtttcaccatgttgaccaggctggtctcgaactcctgacctcaggggatccgcccacttcagcctccgagtgagccactgcactaagcctcaaatttaattatatgtttacaagtgaaaagatttacttcaaaatgggtgtgggaagagatatagatgaaataagatttctaatttttagttagatacatccatgaaggttattctctattacacttatgaatgctgcacctctacttaagcctcacagccggtctctgaaataagtacagtatttcacactgccttattagtttcacagagcacccaacagaaggaatttccctctacaaattcctcaacagagccaacagtatccctactactatccattccctaacgtcgcctaagtacctaccatgcaacagaagccaagaagacaggcctagccctgcacgcatggacacatactggtaggctatttccacaactaactacacattctgacttaagggaaaaaaaaagaacgttatgtatctagaaagccaagaattcattaggtttgtggagagaaatactcaagtgaaataatattcttgcattcattgattcgattcttaaaagccaaagaaagatggatgtactccttcacacttcgacaggaaaggagtgtcaattatggctcatctgagtaaatgtcccactcagacttcttccaccctccatctacaggcttcttcacactttttatctgttggtatttctacttatccctcaagatgcccaataatcctccaattctcagggaatataaatttcgcaggaagggttgctgttatgatggtgggatgggtaaagaaaccgaatctagaagaaatctcacaagctcgtggttcaggaaaatcttagcgaattcgggtgagcaaccatacctcctccccacttccccaggtgaaatgttttggcttgaccttagaccactatcttggctttaatcacttattttctgtggtaaatgctaaaggggtcagtctctccctaaaccactttcttttcttaatccagcagtcaaggtgatctggatgagactcaagtctccccagccttgcttcatttttgcttatgtcttcacaacccaattctcatttacattccctattccttaccctacttcacttaccttaatggcagtgatggcaaaggctattttccgccgcccatcgatgttggtgttgagtactcgcaaaatatgctggaacttttcagggatcactagagactagttgaaaaagtacgggggaagaaatcagacacagtaaactatcaaacagtaaggccgataaggcaaacgaacttcatacaaaaaggttaagcctgtcacacaagtggcaagacacccgccccccattccttaggttttcacaccacagagcaaactcctcagtcctgcagagtaggcacatgaagcgttcaagcttgggaaaatgcaacctctggagagaggaagcaggtctcctgcccattcccaaaagtgcgtggcaaaagccagagttccccatatacgcccaagccttagacagctttcgtgcgcccgagcagtgacccttcctcgggcccgctctccggaattggaaatctttggtgtccctttccagggacgcgatccaaggctccatacagaaagtcgcaggccctcagggcaggacgtttccagaaccctgacagccggctttccttgcccgagctgcgatgccgctggatcacggcacggattccagtcttaccatggctgcagcacaagcggcggcgtgtaggcctcctgtggaagagagagcggaagtgacgcgatatcattatatagcttccaggaggaagaggcggtgcgatctaggagaagtgcttccggaaactgtttcagcgcgacctggctggatttatgagagtatggcttgggtaccacaacttccggtgcgcctttctttacagttcgtaaggttcataggtaagagaacagcgaaggttccggggctagtttgtgtttcagacttccatatttccatttgcagttgggtgaagtggttagagctgaaaggggacagctggagtcaaacaacttaactcaaatatctgggaacgatttcgcgctgaggaagaccctttgggacttgtagctccactccggggaacggactcgccgggactgacagttgccggaagtgaggctgcggggaatggccgccgctgcgaccatggcggctgcggcccgggaactggtgttgcgggctgggacctcagatatggaggaggaagagggcccgctggtgagagcgcggagctgtttctcctccgtagttccggtgctcctagcttcagaaagacctgagctgggtttaggcacaagggtgggaacttggctgctacccgtgatattacctgtttggctccccgtacccttccctgtgatcagacccgaccctgagcgggaccctagtggctgaaactcatgttctggggcacaaaatttcaacttcactccacattttggggtagagtcacgaagtagtatagtgtaaaggttaagaacatggcctctgaagccagactgcctgagttctatctctgccacttacacgctgtgtgcccttgggcaagttaaccagcttctctgtgccatcatttctcacacctttaaggtgaggaagatagaacctattgtatacatcgtcgttaggattagatgaatatgtgtaagattgcacctggcatgcaggtaaacactatgtgttttgacatttctagaaagcctggggttccccagaggtgtgatagaacacccaagatggcaggagtctgagggtcttaaatttaagtgcaagttctgctctatcctctgcaattcctagctttcctcattcggtcatctccactgcacttttttttttttttttttttttttgagacggagtcttgctctgtcgcccaggctggagtgcagtggcgcgatcttggctcactgcaagctccaccttccgggttcacgccattctcctgcctcaacctcccaagtagctgggactacaggcgcccgccaccgcgcccggctaattttttgtattttttagtagagacggggtttcactgtgttagccaggatggtctcgatctcctgacctcgtgatcttcccacctcggcctcccaaagtgctgggattacaggcgtgagccactgcgtccggcctccactgcactgtcttgtcttttacctttttttgttttctttagacgggtttccctgtgttacccaggttgaccttgaactcctgatctcctcaaacaatcttcccgtctcagcttctaagtagttgggactacaaggagcccaccaccatgctgggctacctccactgtctcactggatcgtctcactccttgtcgtattccttacccatcagcacaaaataggagagtgggtacaacgtgagactcttagaatttttcaaagcagtacctgtggctcccagtaaaagcagctccttctcacttgaaggactggggatatccaattatattttttctttctgtctttcaccgtaccctactcccattaacttatccctttccaggcgggtggtcctgggctccaggaaccactgcaacttggggagttggatatcacttctgatgaattcatcctggatgaagtggatggtaagcgatggcatggggtgggtgcagtacctgtaatctgagaggcatgggggctggaaggaataaggtagggattggtgtgcagatactcaatgtggggagagggagctgtggagctggacccttatgataaacttctatttccagttcacattcaggcaaatctggaggatgagttagtaaaggaagctcttaaaacggtgaggctttcccctgtactaatctgcccttctatctattctaccccaaaaggaaaaacaacagtctcttgcttttgttgtatcagcctggtatctgaccctttagtccttcactgattctgttacagtgtccctttactgagacttccttctgacctgtcatctttatgttctcccagggtgtagatctccgtcactattcaaagcaagttgagctggagctacagcagattgaacagaaatccattcgggattgtatcctccagcagagggaaggggtggtgctattgacatggggattttgtggcgtgtggtacagatgtcccagctggggtcaacatctctgaggtttctatcacttcaaagagaaattggagaggtactacaaatctgaggatctcccatcttcaccatgaggccccttgactttttgtggatcagatattcaagagagtgagaatatagcatctctacacaaccagatcacagcctgtgatgctgtcctggaggttagtaatcatgacctgtgacccctaatagctactctgaaccagatcatggactctggtgccatttttaggtcatcagcctcaagatggggacaggttagggtcattttcaagatgacttcaggagccttttttgttattactgccatatttaatgttatttcctgataatctggggtgtctcatcatctgccaccctcaaggactgataaatactgaagacttcacaaagagtctttggtggcccacttatcccctacaaaccctatagcactccggcaacatctaccctccctacagcgaatggagcagatgttgggagcttttcagagtgacctcagctccatcagctctgagatccggacactgcaggaacagtcaggagccatgaacattcgacttcgaaatcgccaggcagttcgggggaaacttggggagcttgttgatggtctggtggtgccttctgctctggtcacgtgagttaccagtttgaagggttataatgtccatagcaggtggatgggctggggtgacccaccctatttaccatatgggtctcctggctccaggttaagtgctttttagaaattagtagccaggttaaccaccatttctttaggtatgcattaggcatcaaagattaagattaagaatgatgtaagatcaggtgtatagtggggaggtccaggaatagaaaactttgtacatgtgtcctgactatatggtacaatgcaaggtggtagagatgacaggggctggaggtaaggagtgtggtctgggtctggtttagggatgtctgggtctcccttgtaactcatcccacccctccctgctaaccagggcaattctggaggctccagtgacagagcccaggttcttggagcagctacaggagctggatgccaaggcagccgcagtcagagagcaggaagctagaggcacagcagcctgcgcagatgtcagaggcgtgctcgatcggctccgggtcaaggtgggaagtagggatggataccctggaggctactggaagcagccttcccaagatcttcactatggatttccttggcagagctcactgtagcctgtctccagggacttcaccctgccttttctgggcagccccattcttgtctctctgggtttccctgaaaatcttgagaaataccaaagagatattcaccacccttctgcctatgtttaccatttgttgcttcccccagttcctctcatacagcaaaagggttgcagcttcatgccctgtgtttggttccccacatctaggcagtgacgaagatccgagagtttatcctccagaagatttattccttcaggaaacccatgaccaactatcagatcccccagacggccctgctgaagtacaggtcacaaccccaaggaagtgcatgggatggcctttgagtttttgagcggcctagtgtgggcatctggtttcttgggagacaggtagactgacatgttcctgaccccctaggttcttctatcagtttctgctgggcaatgaacgagcaacagcaaaggagatcagggatgaatatgtggagacgctgagcaagatttacctgtcttactaccgctcttacctggggcggctcatgaaggtgcaggtaaggtcaggagggagaggtattcctgggcacatggactgggaggaggggacatccctgggcaaggaatattttattgtgttgtgggaagagacggttatcagttctcttttctctttccttagtatgaggaagtcgctgagaaagatgatctaatgggtgtggaagatacagcaaagaaagatatcctagtactggggaaccctcatgccaggccttgagagtgggaggactttcgactccagccaccaatgcactgctccttaccttttcctatgggactgaaaccttttagaatgtgatgaaagctatagcctccctccccagaaagatgcacacattattttgacacatagttttgcatatgattgcaagggagggagagacaccctgaagcccattcacagatgtcagcacgtggggccctagtactgggaaagagggctggctaggccacgtctgcctgtctggggtccccacagatagtgagtctttgggcccagttatggtctcattgttttccctgactctgacccatcttacgattcttctcaaagccatcgctccgcagcaggaacaccattttcaccctaggaacccgcggctctgtcatctcccccactgaacttgaggcccccatcctggtgcctcacacagcgcagcgcggagagcagagggtatgaggaggaacaagcttcagtcacgaaagaggctctgagcacggtggggagggaaggccagacctcagggcagagcttcccaacctgcaggccctgtcttaatccccttagacttgggagtggccttctccaatcactccagcctgctgtgatgtgaaaagagctgggaaccattgacttaagggcatgcagaggggagagactggatgaggggaatgacagtcagaggcaggtgttgaggtggatgcaggagtagcaacagcaggtgggtgtaggccctttttgtacccctatgttcccccaccttttcagtgcccattcagcttgctcttagacagcccggacctagatagatgcgaagggtctgcctagctcttattactcaggtttactgattttccagccatatccatgggaagtcagtgttggggtccatcccttctgtttttcttctttactcctcctctcccagtatccatttgaggccctcttccgcagccagcactacgccctcctagacaattcctgccgcgaataccttttcatctgtgaattttttgttgtgtctggcccagctgcacacgacctgttccatgctgtcatgggccgtacactcagcatgaccctggtaagactcctgtttcctgtaccattcaacacctttgtccccagtcttcatcagcagcatagtggggtcatgactctggtagaactgaaatcaggatcgcctcattctaaaatgtctaagccttggctgggcgtggtagtgcacacccataatcccagcactttgggagtccaaggcagtaggattgcctgagctcaggagtttgagaccagcctgggcaacaacctcatctctacaaaaaatgaaaaattagccgggtgtgtgttgatgtgtgcctgtggtcacagctactaaagatgctgaggtggaaggattgcttgagcccaggaggtcaaggctgcagtgagccatgcactccagagtgagacctgtctcaaaaaaaaaaaaaaaaaaaaatagccaggtgcagtggcttacgcctgtaatcccagcactttgggaggctgaggcgggaggatcacaaggtcaggagtttgagaccagcctgaccaacatgatgaaaccctgtctctactaacagtacaaaaattagccaggtgtgcgcggcctgtaatcccagctactcgggaggctgaggcaggaggattgcttgaacctgggaggaggagattgcagtgagccaagattgcgccattgcactccagcctgggtgacagagcgagactccatctcaaaaaaaaaacttgttacttagacttgtcacagtgttactcccccatgaaatcctcagtgcgtagggtccctgagactacccctactgctgacccacaatcaggcaatagcacgtgaaaactgagggtcccccaaatcttggtgctcaaacccctgacccaagctcagccctgaactctgctgtgataggcttgtgatcatagatcctggtgtggccaggtgcagtggcttatgcctgcaatcccagtactttgggagaccaaggcaggaaggttgcttgaggccaggagttcgagaccagcctgggcaatgcggcaagaccttgtctctacaaaaaatttaaaaataaacttaaccaggcatggtggtacacacccatggtcccagttgcttggcaggctgaggtgggaacatcacttgagcccagatgtttgaggctgcagtgaactatgattgtaccattacaatccagcctaggtgacaaaacaacctgtctctaaagccgaaaacaccgggtgcagtggctcacacctgtaatcccagcactttaggaggctgaggtgggcggatcgcctgaggtcaggagttcgagaccagcttgaccaacatgatgaaaccccatctctactaaaatacaaaaattagtcgggcgtggtggcaggcgcctataattccagctactcaggaggctgaggcaggagaattgcttgaacctgggaggcaggcggaggttgcagtgagccgagattgtgccactgcattccagcttgggtggcaagagtgaaactctatctcaaaaaacaaaaaaaaagccaaaaacatagatcctggacaggaaagcagggggcagttccattttacgtctctcccttctgtcctgtccagtgcatcatccccaaagaaacaaatgcgtttgttcatagtcactgaggacaacaaactgacattctcttttaatcctctgtttgttccccaatcacacagaaacacctggattcttatctagctgactgctacgatgccattgctgtttttctctgtatccacattgttctccggttccgtaacattgcagcaaagagggatgttcctgccctggacaggtcactgaattctggtccttgatgcccaacaggccacgaactctcttggtcttgcatgactctgccctgaccttagactcctactgacctggtatcatcaacctttattcccattcatttgctccggaggcagtagtgctgctttttgactcacctttctccaaccactgccccccaacccccacaactagctattgaccattaaactgaatgatgccccactccctcccatccccctccaacattccttgctggctgacctctgattctgattaagcccacaggtactgggaacaggtgcttgccttgctatggccacggtttgaactgatcctggagatgaatgttcagagcgtccgaagcactgacccccagcgcctaggggggttggatactcggccccactatgtgagggagggcaagggtaacaaagggttcttgaaaggcagggctctaagcatcattgtgggggttggccaaggtcacagttgtgtcatgggccacgctatgagcaggtgttctgggagggtggtgaaactcatggtgagtggtgcactgtgggtaggagggactgaaggtagagtcacatcacatggaggtgggttggctaaggaagttgggaggttgtgttggttgggccaggaggtgggtgtgattttccttcccactctctcctagatcacacgccgctatgcagagttctcctccgctcttgtcagtatcaaccagacaattcctaatgaacggaccatgcaattgctgggacagctgcaggtgagggtcggacaggagacacttcccagcagcagggctgcttccagtgggtggagtctgaggaggagccagatggggcccagatgaccttgctttctggtgtcacctcttcctctctgccttttcaggtggaggtggagaattttgtcctccgagtggcagctgagttctcctcaaggaaggagcagcttgtgtttctgatcaacaactatgacatgatgctgggtgtgctgatggtaataggtgctccttctccttgccttcctacccagaaaattcggtttcccccactgctgttagctctgtgagggcagagatgatgcctgtcttgttcagtgttttactcttggagtctggcacagtgtccagcttagtacaataagtgtggaatgaaggggacatcctgaagtgaaggactgctttccccaaactagacatttccctttgtcttcccttaggagcgggctgcagatgacagcaaagaggttgagagcttccagcagctgctcaatgctcggacacaggtaggggtgtggggaaaagggaagagacagccttctgtgctgttttcagctctctctctctctctctctgtgtgtgtgtgtgtgtgtgtgtgtgtgtgtagggagtggcataatggatctcaggtatgcggaattactgtaactcttgattcacaacatactgtcattattggtctattttattttattttgtctttggtttttttttttttttttttttgaggcaaagtgtcactctgtcacccaggctggagtgcagtggcatgaacatggctcactgcagcctcaacagcctgggcttaagtgatccttctaccttagccccctgggtagctgggaccacaggtgcgagccaccatgcctagctaattttttatttttagaatgaattttatttttttctttatctatcctctcaagcatttatcctttgtgttataaacaatccgattacactaagttattttaaaatgtacaattaagttataattgactatagtcaccctgttgtgctgtcaaatagtaggtcttatttattcttcctatttttgtttgtacccattaatcatccccaccttctccccagccttccactagccttcccagcctctggtagccatccttctactctcttcgtacatgagtacatgagttcaattgttttgatttttagattccacgaatcagtgagaacacatgacgtttgtctttctgtgcctggcttatttcacttaatataataatttccaattctatgcatgttgttgcaaatgactgagtctcattcttttttatggctgagtagtactccattgtgtatatatcccacattttctttacccattcatctgttgatggacacttaggttgcttccaaatcttagctattgtgaacaatactgcaacaaacatgggagtgcaaatatctcttcaatgtactgatttcctttcttttgggtatatacccagcagtgggattgctgaatcatatggtagctctacttttagttttttgagcaaccttcaaactgttctccaaagtgtttgtactaatctacattcccaccaacagtgtataagggttcccttttctccacatccttgccagcattgctattgcctgtcttttggataaaagccattctgactggagtgagatgagatctcattgtagttttgatttgtatttctctgataatagtgatggtgagccccttttcatatatgtctgtttgccatttgtattcttttgaaaaatatctattcaaatcttttgcccattttttaataggattattagactgtcatgtagagttgtttgagccccttatatattctggttattaatcccttggcagatgggatgtgcaaatattctttgtctcttcactttattgtttctttagctgtgcagaagctttttttttttttttttttttttttgagatggagttttgttcttgttgtccaggctggagtgcgatggtgcgatctcagctcaccgcaacctccgcctcccaggttcaagcaattttcctgcctcagcctcctgagtagctgtgattacaggcatgtgccaccatgcctggctaattttgtatttttagtagagatggggtttcaccatgttggtcaggctggtctcaaactcctgacctcaggtgatctgcccagctctgtctcccaaagtgctgggattacaggcgtgagccaccgtgcccagctgtgcagaagctttgtaacttgacgtgatcccatttggccatttttgctttggttgcctgtgcttgtggggtatggctcaagaaatttttgcccagacccgtgtcttggagattttccccagtgttttcttgtagtagtttcataatttggtcttagatttaagtctttaatccatttgatttggttttcatatgtggcgagagataggggtatagtttcattcttctgtgtaatggatagccagttttcccagcaccattattgaagagactatctctctttttttttttttcagacggagtcttgctctgtcacctaggctggagtgcagtggtgcagtattggctcactgcaacctctgcctccttggttcaagtgattctcctgcctcagcctcctgaatagttgggattactgatgcctgccaccacgccgggctagtttttgtgtttttagtagagacgggatttcaccatgttagccaggcttgtcttgaactcctgacttcaagtgatcctcccacctgggcctcccaagtgctgggattacaggcgtgagctaccgtgcctgaccaagagactatcttttccccagtgtatgttcttggcacttttaccaaaaatgagtttactgtaggtgtgtgccagctaattttttaattttgtaaagacagttgtctttacaaaagacaactgttgcctgggctggtcttgaattactgccctcaagtgaaaaatcttatgattcttttttttttttaaagacggagtctcactctgactcccacactggagtgcagcgatacgatgtcagctcactgcaacgtccgcctcccaggttaagtgattctcctgcctcagcctctgagtagctgggactgcaggcacgtgccaccatgtccagctaatttttgtatttttagtagagatggggtttcaccatgttggcccagctggtcttaaaactcctgacctcaggtgattcacccgcctcagcctcccaaagtgctgggattataggcatgagtcactgcacccggcctagattctgtttttaatgacactggaaaacaacgaatttttgttttggcatatatatagctttacttttaaaagcaagaacacacacaaaaaaagggggaaaaaagcaagaacacaataaatgcaacatttagatcaacgagtacctgtgcacgagaagcacagggatggtttcagtaggatttcatagtttgatggtgacttttgccaagctgctgctacttggattgtgtggtgtgtttgtgagtgtttatatcattaaaaaacaaaacagccactgcactgggttgttttattttttaatgatataaacactgatgagacaaggcaagaaaacagcaaggcaaaaaagaaaaaaaaaaaagccaggcatggtggtatgcacctgtagttctagctatttgggagacaaaggcgagaggaccactttgaaatccaggagttcgagattacagcgagccatgatcatgacattgtagtctacccttggcaacacagcaagaccctgtctcaaacagcaaaacaaaacaaaaaaccccagaatcacaggatttttttcatgcataatttttctaatattgtcatgttattgcatatggctatagctcattccttttcactgccatatatgacttgtgtgattaaacatattctataaatggattgtttccagtttcttgcttctgtgagcattgttttatgaataatcatgtcttttagcacacatagatattgattatcttcatcaaaagtttctcttgggtataaacctaggacagtagtcttgctgctaataagatatgcagtattagtctttatgagacaatgataaattgttttcctaagtagttccttctcaccagcaatatgtaagaattcctactgagccacattttctccaacatgtggtattatcaggtctttgccattttttttctttttttttttagagaccaaggatgctgctaaagatgctcgggatcagaaatgtttcagattttgatttttttcggattttggattccttgcattatttttactggttagcatctgtagtctgaaaatctgaaatctgaaatgctccaaagagcattacctttgagcatcatgttgatactcaaaaacttccggattttggagcattttggatttcagattattggattagggatactcaacctgtatttcagtgggttttatttgtaattttctgattactaataacattgagcatcatttcaaatgtttagtaactatatgtaggggttcagtcaggctggtgggaaaaatattagtgatgatagccacaaaccctcttggaaggcctaagagtttgcataacttcagtaatagatatggttgaaggcgacctgatctttacctttagttaaataaattagagtaataacaaaggaatgtggggaagttatctaggtagcttgtttactcatatggtcttaagactaatctttgatgtaccgcaggtgcttaactgctttctactcaggaagtccacaatgtcagttaccccgtagtggtgttgactcaagtctttgtcaattaatctttactgaataaatgcgagtctcactagctggtcagggccgccattgcaactgtttacagtactcttcagggagtctgtaaacagcctggacacactcagctggactggcaaagcagagtatctgtgtgtcagtgtacctcattcatccgttgccgggtcaggggtctgcaagggacagactccctgaagctggtgctctgtgtgaggagcgtcaccacaactatacaatttttttttttcctgtaaaatggctgtcatagcatttgaccttttaaaaatcggcttgtggctgggcagggtgtacacctgtaatcccagcactttgggaggctgaggcggatggatcagttgaggccagtaattcaagaccagcctggccagcatggcagaaccctgtctctactagaagtacaaaaattaaccaggcatagtggcgcatgcctgtagtcccagctcctcaggggcgctgaacctgggaggcggaggttgcagtgagccaagattatgccactgcactccagcctcagttacagagcgtgactctctcaaaaaataaagaaaaaaataagtctgctagtattttttatttataagagttctttgcatcatctacatactaatcttgttgattatacgtaggttacagattatcttttagtatgtatctttttacttttttttttttttttggtgagatgagggtctttctgtgttgcccaggctcctgggctcaagaaatccttgcacctttttttttttttttttgagatggagtttcactcatgttgccgaggctggagtgcaatggtgtgatctcagctcactgcacctctgcctcccgggttcaagcacttatcctttctcagcctcctgagtagctgggattacaggcgtgtgctaccacgcccggctaatttttgtatatttagtagagatgggttttgccatgttggccaggccagtcttgaacgcctgacctcaggtgatccatccgcctcagcctcccaaaatgctgggattacaggcatgagccaccgcgtccagcctttgtttttttaatgttgctttttgattaaagaaatttgtaattttaatatgattgaatttatctgtccttcatttttatgtctttgtttttagtaacagtcttgctctgtcacccaagctggaatgcagtagtgtgatcatggctcactgtagcctcaacctcctgggctcaggcaaccctcctccctcagcctcccaagtaactaggactacaggtgtgtgccatatgcccagctaatttttgttgttgttgttgttttgtagagacagagtctcactatgttgcccaggctggtctcaaactcctggcctcaagtgatcctcccgcatcagcctcccaaagtgctgggcttacagccaccatctaccacgcctgactatttttgtcctgtttaagaaattcctgggctgggtgtggtggctcacgcctgtaatcccagtactttgggaggctgaggcgggtggattacgaggtcacgggatcgagaccatcctggccaacatggtgaaacctcgtctctactaaaaatacaaaaaaattagctgggcgtggtgatgcgtacctgtagtcctagctactcatgaggctgaggcaggagaatcacttgaaccagggaggtggaggatgcagtgagccaagatcgtgccactgcactccagactggtgatagagtgagactccgtttaaaaaaaaaaaaaatgaaattccttattactccaaggccagaaaaatattatgctacattttcttcttaatattgtagaattttggccaggtgcagtggctaaagcctgtaatcccagcactttgggaggccaaggcaggaagattgcttgaagccaggagtttgagaccagcctaggcagtatagtgagacctcatctctacaaaaaattaaaaaaatatattagccaagcatagtggcacacacctgtagtctctgctactcaggtagctgaggtgggaggatcacttgagcctgggaggtcgaggctgcagtgagccctgtttgtgctgctgcactccagcctgggcaacagagtgagaccctgtctcaaaaaataataataaaattaaagaataaacaaatatatagagagaatttttttgttacctttaagtctcaaatttacttggaattaatttttgtgtgtgatgtgaggtagggatctatttcttttttttatgtggatggttggcccagaaccatttatagaaaatctttttcttttctttttttttcttttctttttttttttttttagacagagtctcactcttgtcacccaggctggagtgcagggccacaatctcagcgcactgcaacctctgcctcctgggttcaagtgattctcctgcctcagcctcctgagtagctaggattacaggcatgtgccaccacacccagctaatttttgtatttttagtagagatggggtttcaccgtgttggctaggctggtctcgaaaagttttcacattttaaaaagtctttaaggattttgattagaattacattgtctatagactaatttggaagaattgatactttatgatattgaaacttcctatccatgatcatgatcatgggctccctatccttttttttttttttttttttttttttttttttttttttttgagacaggttttgctctgtcactcaggttggagtgcagtggcacaatcatagctcactgcagccttgaattcctgggttcaagtgcttctcttgtctcagcctcccgagtagctaggactagaggcacacagcaccacacttggcttttttttttctgtagagaatacaaaatttaaaaatttaattttttgtagtgtctcactaaactgggattacagatgtgagccactccacctggcctcctcctccaatttttaagagagtcttttaatgtcttttgataacctttttaaattttcagcacaaagacactgtaagtcgtttgccatatttttaggtgggtataatacgtatgtttagttctactaggaataaataaatcttttctagttttttgtctttaacatcttatgtttttgatttcttattctactggctaacactcccaggatgatgtttagaagttgaacagaaaggtgatagtgagaacccttttcatattcctgattttgaaagaattgttgctggtgctgtggctcatgcctgtaatcccagcactttgggatgctgagatgggagaatctcttgagcccaggagtttgagagtttgaggggatctgcctgggcaacatagtgagactccatttcttttttttttttttttttttagacagagtctccctctgtctcccaggctggagtggtgcagtggtgcaatctcagctcactgcaagctccgcctcccgggttcatgccattcttcctgcctcagcctcccgagtagctgagactacaggtgcccagcaccatgcccggtattttttttgtattttgtatttttagtagagacggggggtttcaccatgttagccaggatggtcttgatctgacctcgtcatctgcccgccttggcctcccaaagtgctgggattacaggtgttagccaccatgcccggctaagaccccatttctttaaaaaaaaaaaaaaaaaaaaaaaaaagccaggcgtagtggcatgcatttgtagttctagctgcttgggaggctgaggcgggatcattgcaggagattaaggcacccacaaagatgcacttaaaccagttgtttctgctgagagcagctgggatttgtcactggatttgccaggtatagagactcgccagctgccatcaatgcttctggtcctttttggtcagctgctgcttcatactacgtaggaaagattgttaaagcccagtgcactgtttcctctggtcactcctctgctatcaaggtgttctcttttgcgttatagaaagcttaaagttcatctaagtccagaccagtactcctataggaatataatgcatgccacaaatgtgagccacttaaataattttaaattttctagaagctacattaaaaagtaaggagaaacagatgaaataattttttaaaccactacatccaaaatattattatttcaacatataatcaataaaaaatagtactgaggccagcacggtggctcacacctgtaatcccagcacaggccaaggcagggaggatcgcttgagcccaggagtttgagaccagcctggacaacatggtgaaaccccatctctacaaaaaataaaaaaaaaatgagtgggacatgttggcacatgcctgttagtcccagctactcaggaggctgaggtgggataatcactgagccaggaaagttgaggttgtagtgagctgtgattgtgccactgcactccagcgtgggtgatggagcaagaccctgtttccgaaaaaaaaaaagaaaaaaaagatatacttaaaatttattctaagatgaagtcttcaaaatcaggtgtatatatcatgcttacaacacattatataatttatggctcctgcctagcaggggtcatcactgttagttcaacttttctttggcaagtctactccctgtgccccaccgtacactgctacattattgtttgtatatgtgtgtgtgagactgcatttaggcaactgtaataggttgaatttggttatttaatctctgtccaaaatcacatcacaaagatgccttgattatagaaagatccttccttgcagcatattagttatttgacaccctcagtggatataagtgaatattttgagggaagaatagaaaagatacaatttttatttatttatttatttatttatttactgagacaagttgctgctctgtcgcccaggctggagtgcagtgacatgatcttggctcactacaacctctgcctcccggttcaagtgattcttctgcttcagtctccctgagtagctggggttacaggcatgcaccaccacacctggctaattttagtattaataatttatttttaaatggaataataatttcactttcttcttaccagatctttctgtctgggttgtttgcttttatgagtttttttgtttgaatctcccttttacattaaacaaaaattaacattttattatgggaaatttcactatgctattagaaaagcatagtgaacccccaggcatcatcagtgatattcggtgtatagcagttcacggacagttttgtttcatctataccaacacctattgcttatcctccttctgtgtcccccagttactttgaattaaatcttatacatatacagatgaatattatcacttcatctgtatcagaatgttatttttattaagaaaattatttttgagatagggccttgctgtagtgcccaggctggagtgtagtagcatgatataactccctgcagcctcgaactcctgggctcaagtgatcctcccacctcagcctcctaagtaactgggactacaggtgtgtgccaccacacctggtaacagatggttttaaaaactacaatacattatcacacttaaaaaaattatcttatctaaaataactattcagattttcccagttatttcataagtgatttttttttttttttttttgagacacagtttcactcttgttgcctccaggctggagtgcaatggcccgatcttggcacactccaacatctgcctcccgggttcaagcaattctcctgcctcagtctcctgagtagctgggattatagacacccaccaccacgcccagctaatttttgtatttttagtagagacaggatttcaccatgttggccaggctggtctcaaactcctgacctcaggtgatctacccgcctcagcctcccaaaatgctgggattacaggcatgagccactgtgcctggccttcataaatgatttttatggttcaaatcaggatccatataaagtccatatatgtgtctttttttagtctatagatttcccttccatctcctctgcaatttatttttggaagaaactgagttattgagtcatttgtcatctagaatgatgtacagtttagattttgctgactgcattccatggtgtggccaaacttcctctgtctggtgtatttctcataagtgtgtaattagatggaaaggcttggtcagatttaaattagtttttttttttctacagggatatttgagaggtagtggtatgtatttccatcaggaagcacataatgtcttcttggctctctttgtgatgttagtagccatcaatttcagtgcctagatacattaattagatttctgtatctcctactatctcaaaattttccatcttctgtctgtgctacattctgagtcctttcttcagttataaattctaattcattgtataattcttgttaatctgttgactttctaaaactggcttttcatatctaaaaaaatttccttttttcaagtctgttcattcctcatagttcttactaattggtcatttttacatcctttttttttttttttttttttgagacggagtcttgctctgtcatccaggctggagtgcagtggcatgatctctgctcactgcaacctccgcctcccaagttcaagtgattctcttgcctcagtctcccgagtagctgggattataggcatccaccatcatgcccagctaatttttgtatttttagtagagatggggtttcatcatgttggccaggctggtcttgaactcctgacctcaggtgatctgcccacctcagcctcccaaagtgctgggattacaggcgtgagccactgtgcccggcctatccttaactttagacattgcacacagtacaactgctatccgtatcggatagttcttaaggtcagcagctattgcttattgtgtctgctgactctcttggtagctgcccttcttttgtgtctagtgatctttgagttcattgtttgatcttaaccaggggaactgtatgggccaaaattaggattgaggatatttttctccatagaggattttccttaacttttgcagcagctgaaagatgccattcagatggatctacattagtcatgatgccagaattgggcaaatctgctgacaccaggacacctgtgtatatgtgtttgtgtctttccaggaattcattgaagagttgctgtctcccccttttgggggtttagtggcatttgtgaaggaggctgaggctttgattgagcgtggacaggctgagcgacttcgaggggaagaaggtatgaggaaaatatggtaatgatgggatcagtggtaagggaagtggaaaagaaaaatgaaaggatgcagattacatggtgggggaatagagtatgaaagactggattgagagaataccagaaaagagggtttgatgataaggatggctataccttggggagaacttagtggagttgaagatcagccagatccctctctgacactgtttcctcctgctattagcccgggtaactcagctgatccgtggctttggtagttcctggaaatcatcagtggaatctctgagtcaggatgtaatgcggagtttcaccaacttcagaaatggcaccagtatcattcaggtgacctgcaagtcccaggccccactcagatcccccatcattaattattttccccatctttttgctgggctcagcatcatctaagtgacccttggtcttcagttactagctgtgcccaaagttctgtatgagccctaacctgattcttttttttttgtttgttttgttttttttttgagacagagtctagctctgttgtccaggctggagtgcagtggcacagtctcggctcactgcaacctctgcctcccaggttcaagtgattttcctgcctcagcctcccaagtagctgggattacaggtgcctgccaccacaaccagctaattttcgtatttgtagtagagatggggtttcactgtgttggccaggctggtctcgaattcctgacctcgtgatctgcccgccatggcctcccacagtgctgggattacaagtgtgagccactgcgcctggccgcctaacctgattcttaatcatcactattagcaccattttacggtttgatccctcaatgactttctttgaccagggagcgctgacccagctgatccagctctatcatcgcttccaccgggtgctgtcccagccgcagctccgagccctccctgcccgggctgagctcatcaacattcaccaccttatggtggagctcaagaagcataagcccaacttctgatgtgccagaaaccgccctgagatctgccggtcatctccatggacttctgcaccccattccatacccttcttcacctggggtaccccttccagttttccccttgcttcccaggcccttgacatggcttacctgccttcactcccagcaccttgcccaacaggataagctggatccccttggccttctgaatatcccagtgtcttcaggtttcccaagaccacttccctgtgggcttccaaaatggcctttatcatttctccagtctgtcaccctcctttcctgctcccatacacccaaggcttgtttcttcccctgtaaaaaccactgcctcaatctctggttcactcaactagtcaccatgtcctgaggcatgaagcctcctcagctcttggaattgctggcaaggggtgactgcctctgagtcattgtgtttttcaaagtgatttcttttctgtagctttttgacctaagatctcagcaatttgaacactaacctctcccctcctggctcaagaattactccgaagtcagtctgcagaaaataaatatttagtatgacatgacacttatcccatttcctttctccttcctcctgaaggtttttcaggtggccccatctctagaatgacctttcctttctgactacttcctgggcttacatcccttctggtgggtgtaacctctaacctctagctactcccaggccattggaggaaggtggcccctggctaaaatagcagatgctgcaagggatgagaaccaggccgcgcagccccagacactgtcccaagggctcccttgggacaagcccaagctgactctggaatccctcctccgtagcagctccatagctcctctggttgtggctgtgacagccccttgctcgggggctgcagcacccaacccacacccacaccgttggggcagggctagaccaggcgaaattcgtaccatccgtttgtttgacttggagccttcctgctgtcctcgcctatacgcctcgtttgaacttaggctctagactggagagacacggggacccctttaaggcctaagaagagaggcgcagttaaggaaaaatgttacgtttcctgtgtcctccacccctacggcctaaacattccctccccaggtccctggagagtggtggaaagcggttcctccccgcttaggcccttcggatgcaggtctagcccgtcggcaacgggaggtgtcctgagtgggtctgtgactgccgagcacacccgccgcggagcggaggctgctgcttcctgaggctgagagtggatccggctccgggctctcctaattggcggacgctggggggcggcgtggtaaggcagaacggagcggcatctcagctctcgccttttcagggttccgccccatatccgagagccgctctctaattggcttgggaaaccgtatctcagcgctttggcctagcgactttgaacgtgtttgcgcctgagaccgaagtgcagaagagggcgagcgcaggaggagaggcttggtgaatcagcgattcctgattggccaggcgtgccttgagggcggggccagaactgcgtccttaactgacctcgcccttgcccagatcaccgcctccgcgttgctccgggtttaccccgcctgactcgctgcgctatgcgttccctcacgcctgccggatgccaggcggcgatgtgccaggctctgaggggccgcgagctcaccccagacgccggccccgggaatcctctgctcctccactttcccttcccgctactggtttcttgcccacccactcccaggtgtcactcttgggacatccagatgttctgacatttgacctgactccagcctcagcgcgaggacgggagaagggccaagggtatgagattttggacaggagaggcattggctactctgacaaagagcgtggattcccaaagaaagggtccccagataccccgcaggggagactgtcgagacaggcgactttagccaactaatgctcgcacgcgaggagggctgtgcaggcaggcaccacggttcttcacagccttccttctttccttcccctgtccgtcgcagaacccaaatcctcagagctgatcgagaagcgcgtgttgttgcagaagtcactgaggggcagacctggaatgtgagccgtggggcgaagggacagctctggagactcgtgattccggaacccggtgggcattcaagtgatactggagcacgcagttttcggggacattaagctcgccccaggggtccacaggaaccctctgacccaacggtctctctggacaggatgatccagaacagacggtgaagagacaaaacagcgtgaaagggagcggcgatacctaaactgacctccggagggcagcatgatcaagggaaggagctgttctcgctccgctcaaacccccgcgcagcctctgcagcttactcctgcttcggaaggcggcgaggttccacccccaccaccccggtccccgccgccctcttcgcgctgaagctgcggagggtctttttcttcagcccccaaatcctctgctctgtggcttaagattcccaggcttaaacccataactgctagggtcatcactcctcaaacttctccctcacttgttttgctgatgacggacacaggggcctcacagactcagaagcatctggagtcatttcgaaggacagaactgtggcaatatcctctttccccctcctaatctctgagaacagtgtctgtatatggcacgggggtccctagtgtcatatagaaggactcggagatgtcctcatgggctgtaacggcccccggtgctattcagggatctctgttctttaaagaaatatcatttccccttatttctctacctttgtgccctcacctcgccctgaattgtttcttaaactgggctttctgggaaacgtttacttcgtgttcaacagcaaagtctcggcataaggcgagggcggcagggggtggggggcgggcgtttgctcgccttggcattaatttcagagctgctgaacgtggacaaaagagagggaacatcctcctttcttccattcctgtaaatatggacccacccaccctccacttaagatgggtggcttttctgattttaagatatcaagcagcctggcgaggtggctgacacctgggatcccagaactttgggaagccgaggcgggaagatcccttaaggccaggagttctagaccagcctggccaatatggcgaaaacccatctctactaaaaatacaaaaattagcctggcgtggtggtgcctgcctataatcccagctactagggtggctgagtcaggagagtcgcttgaacctgggaggcggaggttgtaatgagccgagatggccactgcactccagcctgggtgacagtgagactctgtctcaaaaataataataataataataataaaaagatataaattggctgggctttaaaataaagtagtcagaggcccagggtggtgactcatgcctgtaatccttttggaaggcagaggccagaggatcttgagcacaggagtttgagactagcctgggcaacatagggagacccatctctaccaaaaaaaaaaaaaaaaaaaagcaaaaagccaagcatggtggcccatgcctgtggtcccagctagttgtgaggctgaggcaggaggattgcttgagaacaggagttagagattgcagtgagctatgattgcactactgcactccagcctgggtgacagagtgagaccctatctctttttaaaaaattaaaaaacaaagtagatttagtgtgaagattcaaggaaagaaagagaaagcaagacaaaactttaaggagaggagaatcgaaattggctgacttcaccctggacataatggacacagctattcatgttacgtactagcgttaacaaagtgttttcagaagcagttgtcattaaaccaacacatttattgaagctcttctctgtgttctgtgataggcactgcggattcagcagagactaaatcaaagtccttgatctcggagagcacatatttcatctaattgaattcacataccagccttatgaggaggtgttcttcctgtttcaggtaatgagcttgaatttcaaataatgagttcaaaaccatataggcactcagtggctgaaccttctgtgcccacattcagcttttgttctatgactccaggctgggagtcatggagctgaggaggcagccggttgtagagaagcaacagattaataagtaatagtaaattattgaaaaaatatttacagaactgaaggaaaagctgaacaggcggtctttggaaaggacagaagccaggatagttccagcatccaggcagcagacaccaatggtcagtgcttctactttggatcaaaaagagagaactccaataggcttagggtgggtcaggtgctcacactcatctgaggaaggggagggtcccttgaggaatagtaccatagactacccaatgttggaggataatggccccaacgcaaaaatgggatcttgccaccagacaaatgggatatagatgccaggctgcaaaatccaacaaatgtacacgtgcccaaatcccgactccatcactaatagccatgcaatcctctgactatcaattagattaattgacactcttttttctctcgctactgtggtacatgcagtagttacctttattcttcactttgttttctcataagactaacaagcagttttttaaaataaagaaataaaagcaaaattgcttattgtcttagtctattcattggcaaactagtaacattaaataaactccagacagagccactggagaagaatcaagtacaacttagtagaaataacaccgtatgtgtgaaggtgagtgtgtgtgtgtgtgtgtgtgtgtgtgtgtgtgtgtgtgtgatggaaaatactttgtcctgcccaaactgtaagtcatgaccatgcccctctcagcagaagtttatcttcatctcatttggaagtttataagaacacagcttaaaaaaaacctgtgattttggagcaaggtcaagcctttgctattgcttccacattttgttttgttttatttatttatttacttttcagttttttggagttttctttatttgtttgtgtttttgagacagggtctcgctctgttgcccaggctggagtgcagaggcaccatctcggctcactgcaacctctgcctcccgggttcaagcgattcccctggcttagcctactgagtagctgggattactggcacgcaccaccacatccagctaatttttgtattttcagtagacactgaaatacatgtttgccatgttggctgggctggtctcaaactcctggcctcatgtgatctgcctgcctcggcctcccaaagtgctgggattacaggcatgagccaccacgcctgcctagtttttagttttttgagacagagtcttgctcagttacccaggctggaatgcagtggcatgatcacagtttactgcagcctcgacctcatggatttaagcaatcctcccacctcagcctctgggatagctgggactacagtcatgtgccaccacacctggctaatttttgtattttttggtaaacgaggtttcaccatgttgcccaggctggtcttgaactcctgagctcaagtgatctcctacctcggcctcccaaagtgttggaattacaggcatgagccactgccccagctgttttattaatttagttaaaaatatatgaaaagaggccctgcgcggtggctcacgcctgtaatcccagcactttgggaggctgaggtgggcggatcacctgcggttttggagttcaagaccagcctgaccaacatggagaaaccccatctctactaaaaatataaaaaatcagctaggcatggtggcacatacctgtaatctcagctactcgagaggctgaggcaggagaattgccctaacccagaggaggttgtggtgagccaagattgcgccattgcactccagcctgggcaacaagagcgaaactctgtctcaaaaaaaaaagtatatatatatatatatatatatgaaaaggctgggtgcggtggctcacgcctgtaatcctaacactttgggaggctgaggcaggtggatcacctgaggtcaggaatttgagaccagcctggccaacatggcaaaaccgtgtctctactaaaaataaaaaaattagccaggcatggtggcaggcgcctgtaatcccaactacttgggaggctgaggcaggtggatcacctgaggtcaggaatttgagaccagcctggccaacatggcaaaaccctgtccctactaaaaatacaaaaattagccaggcatggtggcaggtgcctgtaatcccaactacttgggaggctgaggcaggagaattgcttgaactcagggggcagaagttggcagtgagccaagatcacaccatttcactccagtctgggcaaaagagcaagattctgtctcaaaaaaaaaaaaaaaaaaaaaaaaaaaaatatatatatatatatatatatatatatatatatatatatatatatatatatacatacatacacacacacatacacacatacaggcactagccaggcgtggtggctcatgcctgtaatcccagcactttgggaggccgaggcgggcagatcacaaaacaggcagggcatggtggtccacgcctgtaatcctagcactttgggaggctgaggtgggcagatcacttgagcacaggagttcgagactagcctgagcaacatggcgaaactctgtctctaccaaaaatacaaaaattagctgggtgtggtggtgcatgccagtaatcccagctactccggaggctgagaggcaggaggattgcttggggaggcagaggttgcagtgagccgagatggcaccactagactccagcccaggtgacagagggagaccctgtctcaaaaaaaaaaaaaaaaaagaaagaaaagaagaaaagaaaaacaaatcacctgccttatgaagaaacagtttgtaatagatataagacacagaatgtgcagcccctggtatggaataagtccttagaaaatgttagtttcctctctgtccctgtgtgacatgaagggaattccagggccagtgccacttcctggtggtttccctcacttaagtgctgtgtaccccattgcaaaagcatgtcttccaggttcctgataccacatcccatgtcctctgcctttggggctctcataggattaagtgtcattttccctatgaactagaaaagaatcttctgaacgtctgccttgggactgatgatatagctgagctgaaaggacaattagttttcctccccagaccaacccaaccttcaaggctggggactcatttgatgctcccattcaaacatttggagaaaattgtctctgagtaccaggtctttttagcatattttctccaaatgttacatccttaggggctttgaatagtagaagagccttcaacattggttcagatggaagcatgcaggcatgtggagagttgccactccctgatccctgaaacaaggcttaggatggaaaagagcctcctggggaggttggctctgaatgtaaagctgggagaggcacctcctgtcaacctaagggcttgttggtaggggcaacatgttgacctggcttccttcccactctgagacatcactggctctcatgcagagctattttccttctttctttctttctttctttctttcttctttctttctttctttctttctttctttctttctttctttctttctttctttctttcttttcttttcttttctttctttctttttttttttgagacggagtttcactcttgttgcccaggctagagtgcaacggcacgatctcagctcaccacaactgccacctccctgggccaagcaattctcgtgcctcagcctcccgagtagctgggattacaggcatgtgccaccatgcccagctaattttgtatttttagtagagatggggtttctccttgttggtcaggctcgtctcaaactcccaacctcaggtgatccacctgccttggcctcccaaagtgctgggattacaggagtaagctgccgtgcctggcctttcattcttttctttccttctttccttctttccttccttccttctttccttctttccttccttccttcctccctccttccctccctccctcctttcttctttcttctctttctttctccttccttccttctctctctcttttcttttctttcttctttctgggtttcgctctattgccgaggctggagtgcagtgagtggcacgatcacggctcactgtagcctcaacttcctaggctccagcgatcctcctacctcagcctccttagtagctgggattgcaggcatgagccactgtgcccagtgtaatgcagggctcttcatccaggatcccaaagggcaaacaaaaataggagaaaattacatttcattttcactaatctctaactgaaatttagcattttctccaatgataaatgtaggcaataaacctacaccggtatttgtagtacatgtgactgttgttaatagaatttacacatttgtgtcatcttccagtagttgcagaaatttcaaaatgtcatgtatgctcacggttactttgtagttagtggtagtggttagactcaccactagatcttcttcttacacattttgtttcattttgacaactgtacttcaatatgattgttttcctttgtaatcccatttattttactttatgcagttgaagattattctgacactccacagacttcaccagacttccaaaacctgtcctagacgtaaaaagttaagaaaccttaaatctctaatgatgctgtcatttcctgttttgtattatcttacaaccagggtaattaggaatgccttcttcttcttctttttttttttttttttttgagacggagtcttgccctgtcacccaggctggagtgcagtggcacaatcttggctcactgcaacctctgcctcccgggttcaagtgattctcctgcctcagcctcccaagtaggtgggattgcaggcatccaccaccatgcccagctatttttttgtatatttagtagagatggggtttcaccatgttggccaggctggtcttgaactcctgacatcaggtgatccacccacctcagcctcccaaagtgctgggattacaggcatgagccaccgtgcctggcttgctttcttcttgtttaaactaaaggtcttcttgtaaaattcctgcttatattttcttcattattactcaaattcaattattcatttatttgccaaatatttagaaaacacttctcttgtacaaaaccatgctgcataaaactgttattatgcgaaaaataatccttactcgccatgccctctaccccgaccccccaaccccatttacaatctggtagagctggactgtttacccacataggacacacaggctgcagcttaccatgggcagggagtggggatggttgttccaggtgcaggtaataagaaggtgtattgtctgtggagaatttaaaaataattctaaaaccaactttttttttttttttttttttgagatggagtctgactctttggcccaggctggagtgcagtggcaccatcttggctcactgcagcctctgcctcccgggttccagtgattctcctgcctcagcctcccaggtagctggcattacaggcacacaccaccacgccaggctaatttttgtgtttttagtagagacggggttttaccacgttggccaggctggtcttgaactcctgacctcaggtgatctgcccacctcaccctcccaaagtgctaggattacaggtgtgagccactgcgcccagcctgaagccaactttttattgatactgcgcaccagcaattataaaaaaatgttagtgacaaaataccccttgcagtgtagcctcctccccccactccaccctgcttggtatgccactgcacacaggggagtttaaccatttccagtttacacacacacacacagacacacacacacacacacacacacacacacacacaaacacacagagcctttgagacttccttttctcctcaactcccccagcccagttctcatgtcactctactcagggtaggatctgcagcactgctgggccagtatccccaaaggtgagccctgtaagctccttggcctctggatggtctcattaatagtccaggatgagccctgcaatcttggcatctgtaggcaggtctcagctcttcttcacacccctgggcttgaaccccttggcaactgcgtttgacagtacatgattcccattcttcatctccagattttccatccttcaagaaaacactggatttcctggtcaagccaaggcttaatgaactggcctggcagcttctctggtcctcaagtttccttttcttgccttactttctgaagacttctagtagttttacttggaagtgtcactgtctccatttttattcctgagttttctgcagttcttttttctgtggccccacggactcatccagagcctgcagggagctgacacctcatctgagctgctagaattgaggtgagaaaggaggttcctaagtgcagaaatgtgttttctcctctccagccaccactgaaggctttggatgtgattgagtcagacctctcctgcacagtctccctttggattacctcaagataaaccaatttgtgactttaattacatccgcgaagtcccttcccagctgcacctaagctaaagtgtgattgaatgaatgaaagagggtgtgctggcgatcagctagggaagtgattccaagggtccctagactccacattaccaactgcaaaatgtgacgttcttacgttctgacaagcgaactctcctcccaaattcattgcctgagttgatgcaaatgaattcagccacgccttttgggtttggcatctgagaagtgtctgtgacttgggaagagtggtcagaatggcgataatgggaagagaccacatttcagctggtggagagtgaaaggacagccaacatcttgccctttctgaagcatacacacattggagattgaaagtgtctgttggcctcacaggcactgaggaaagcctcccatccccttagattttcctcctttttcctgaggtcccctgaacctaatagtctgtaaccttattccatgtctgggtcaacaaaccaccttccaaggaggacttgaatataataatccgtttcctctgcattcctccagaacacagagtccacaccatccatgagtctgtcaaacaaaacattcctcattggtctcaatgttgagcactgaaagttctctgagctcatttagcaccaactcatcatccttaaaatccacaggatgggccgggtgcagtgacccatgcctgtgactacaacaccttgggaggccaaggggcagatctcttgagcccaggagttcaagaccagcctgggaaacatggtgagacaccttctctacaaaaaaaaatttttttttttgagacggaatctcactctgtcgcccaggctggagtgcagtggtgcaatctcggctcgctgcaacctccgcctccagggttcaagcgactctctgcctcagctcccgagtagctgggattgcaggcatccaccaccatgcccagctaatttttgtatttttagtagagacagggttttaccacgttggccaggctggtctcgaactcctgacctcgtgatctacccgcctcagcctcccaaagtgctgggattacaggtgtgagccaccatgcccggcctacaaaaatttttttaaaaaaattagccaggaatggtggtgtacacctgtggtcccagctacttgggaagctgagataggaggattccttgagcccaggaggttgaggctgcacagtgagctgtgatcacgccactgtactccagcctgagcaatagtgagaccttatctcagaaaacaaacaaaacaaccaaaaatatccataggatgaaacatatgtttgattatgacaacttgcttatggtaccttctggatggcccagctcccttgcagatccccagaccaacagcttttgttgtagtgacagcttcttcttgtaacctctttttttttttttttgagatggaatttcactcttgttgcccaggctggagtgcaatgacatgatctcggctcactgcagcctctgcctccagggttcaagcgattctgctgcctcagcctcctgagtagctggaactacaggtatgcaccaccatgcccggctaatgtttgtatttttaatagggacggtgttttgccatgttggccaggctggtctcgaactcctggcctcaggtgatccacctgcctcagcttcccaaagtgcttggattacaggcgtgagccactgcacctggcctacagcctctaatttcattttcatccaaaagctttaatggaaggcccacagattccctcttcaagtaacagcaaagcgcatctcctttaagatttctttgatcatcttcataaagcttgactttgaagtcttctgaggatttctcctggaggcaaaccagatatatagacatttgtatttctgtcttcttcaacatgaaattatcctcattccatttttcttttatctcccctgtttttaggatcagtgggtttggggggttttctttgcagaaattctgcattcctagcattgacattttgtacatttgcaggagagctagatgccccaccattagaaaagccacacttggctgggtatgtagcaatgaaaccttcagtggccttgggaaaccacgccttcttgtccagatcccactcattgtgggagtcagttggctgctgccctaaataacccgtttgtcactgagatcttcttgtctgttgcagtccttagtgtctccatataatttatgcattcacaactgctcatcaagtcatcattatcatccacttcatgtttcctacctagccaggggcagggttcaggtaatcaaagaggctgctctgctgggcctgcaaggctccaccaagtgtgtctgaggtgacagcccaagcactgttataaatatttgcgcactgttgtaaacatttgcattagtcccttctcgcactgctataaagaaatacctgaaactgggtaacttataaagaaaagaggttgccgggcgcggtggctcatgcctgtagtcccagcactttgggtggctgaggcaggtggatcacttgaggtcaggagtttgagaccagcctggccaatatggtgaaaccccgtttctactaagaatacaaaaattagccgggcatggtggccagcacctgtaatcccagctacttgggaggctgaagcaggagaatcacttgatccggggaggcagaggttgcagtgagccaagatcatgccactgcactccagcctgggtgacagagcaagactccgtctcggaaaaaaagaaaagaaaagatgtttgctgggcacagtggctcatgcttgtaatcctagcagcactttgggaggctgaggccggagggttaatcacttgagctcaagagtttgagaccagcctgggcaacatggcaaaaacccgtctctataaaaaattcaaaacttagctgggtatggtggcatgtgcttgtggttctagctacttggggagctgaggtgggagaattgcttcagaccagaaggtagaggctacagtgagctgtgattgcgccactgcctgggcgacagagcaagaccctatctcaaaaaaaaaaagaggtttaattggctcatggttctgtgggctctacaggaagcatgatgctggcatctgcttgccttctggggaggtctccagaaacttacaattatggcagaaggcaaaggaggagcgagccttctcacatggcaggagccgagagagagggaggaggtgcggcacacttttaaacaaccagagcttgccagaactctctatcatgagaacagcaccaggaggatggtgctaaaccattcgtgagaatccactcccataatccaaccacctctcaccaggctccacctccaacactgggactacatgagatttggtggggacacagatccaaaccatatcaacatttaacacattgcatctttgaattgtcacagcaaccctgtgaggtgggtactagtgttatccccattttacagagaggaaattgatgcccagagaccttgccaaggttatagacaggacagttagtgcatgacaaagctggaattggaatgcagccagttctgctttagaagccactttcttgcctgcctttctttctttatttctttatcttttctttctttctctctctctccttccttccttccttccttttctttcttttcttttcttttttttttttttttttgagacagggtctggctttgttgctcaggctggagtgtggtggcaccatcttggctcactgcaacctccaccttctgggctcaagtcatcctcctacctaagcttcccaagtagctgggattacaggtgcataccaccacacctggctaatgtttgtattttttttagtagagatggggtttcaccatgtttgctaggctggtcttgtactcctggcctcccaaagtgctgggattagaggcgtgagctattgcaccccgcctgaagctacattctttttttttttttttttttaatgagacgagtcttgctctgtcccccaggctggagtggtgcagtggcgtgatcttggctcactggaacctccgcctcccgggttcaagcaattctcctgcctcagcctctcgagtagctgggattacaggcacctgccaccactcctggctgttttttccatttttaatagagacggggcttcaccatattggccatgctggtctcaaactcctgacctcaagcgatccgcctgccttggccttccaaagtgctgggatacaggcataagccatcgtgcctggccaaggctacattcttaaacgccactttttacagcttccaagaaactaactgggtgaaatccagcctgcctcctgtccttgtttttatcatttcatagtgaaaacataaactcccaagcccacctactctattgcactgtgtctccatgacactctgtaccttctggctctgactcagccctccactttccccctccctaacctgcctgtgccctctaataaactgtagcccccctcatacccttagcttctccttggagcattccctccacttcctggcgttaagtgaaatttaactctcccttgagggcactacctcctttgcaggcttctgaaatgagagctgttgattttcttacagctgagggtgctctcctggcttcagattgctgcctccggactactcctcccccagcccccaactctagtttaaaataacccgcggccttccaggcactgcaattaggctaaactttcctcttcctttctcactgctactgtctgccagacccctccacctcactcaggggaacgctggcccagctgaccgtctgtctttgcattgagtcctccctctgggagacttcattgtccacctggaggatccattccctacttgacctctcaataacctggccacttaatccccaagaatcttctcctctccaactcggccacacattctcattgtcataccctggaccttatcacctgaaagagcccctccttgagaatcagtcaagcagcctgctcttggcccccacctcctaaccgtctgtccatcagtctgtctgccctcctcgcaaccaattttcagtctcctaggacctttggatcaatgatgccttccgtcttccagcttatgagcccctccctattcagctcaactccacaacccttcatttcaacacctctctggacaatgtcgccaactccccttcccctctgtattttcatcctttgtacccaagtggcaaaaccccaaccctggatgagcccagtgatctgttttcttcaggattttactctgatagccaagaactgttggtggtggtgggggaaatcacacaatcaggaaatggttcccactcctcactcatgatcatgaactctaaggaggctcccagaattgtttagtggcccaaccacatcactctggtcaatggctacgttaaacctccctgatccttgaacctctgaggctcttctgtctctcacctcatgctcacttgatgacctccctcttatgtcacagagaaaatgaaagtcatcagaggtgagctccctcaaccatctgtcaccagatccacacccctccaagaggaacacaatgcatgcagcgcatgtaccttgatttgatcctgatttgaaatatatgcataggctggatgcagtggctcacgcctgtaattccagcactttgcttgagctcaggagttcaaggcaggtggattacttaagctcaggagttcaagacccacctgggcaacagagaaaaaccctgtctctacaaaaaaaaaaaaatacaaaaattagtcaggtgtggtgggtcacacctaaatagtagttccagctacttaggaggctgaggtgggaggatcacttgagcctgggaggtggaggttgtagtgagctgtgattgcactgctgcactctagcctgggtgacagtgagacccagtcaaaaaagaaagaaggaaaggaaggaaggaaagggaggagagagagaaaggaaggaaggaaggaaggaaaaacagaagaaaggaaggaaagaaattaaaaagaaagatatatatatatataaatatatatataaaagacattttgaggctaactggggaatatttgagtatattctgctatcagatgaagtgaagaaatgatcgttattttctaattttgtttttttttttgagactgagtcttgctctgtcaccaggctggaggtcagtggcgcaatctcagctcactgcaacctgtccctactgggttcaagcaattctcctgcctcagcctcccaagtagctgggattataggtatgcaccaccacgcccggctaatttttgtatttttagtagagacggggtttcaccatattggccaggatggtctcaatctgttgaccttgtgatcctcctgcctcagcctcccaaaatgctgggattacaggtgtgagccaccgtgcctggccatgatcattattttcttagctgtgattacgtattgtggttatggaatctccttatttttgggagatgcatgctgaggtacttaggtgtgaagcacatgctttcctatattttcatatggtccaagaatgttttagtagtcactcaacaatttctatgtttaaaaaaaaaaaaaagggctgggcacagtggctcatgcccgtaatcaatccgagcactttgggaggctgaggcaggcggatcacctgaggtcggaagttcaagaccagcctgaccaacatggagaaaccccatctatagtaaaaatacaaaattagcttggcgtggtggcgcatgcctgtaatcacagctactcgggagtctgaggcaggagaattgcttgaacccagtaggcggaggttgcgtacagccgagatcgcgccattgcactccagcttgggcaacaagagcgaaattccatctcaaaacaaaaaactaaaaacaagcccacaaagacgtatataggccttggcactgtggctcatgtctgtaatcccagaactttgggaggccaaagcaagaggatcacctgagtccagtttgagaccagctgggcaacaaggcgataccttgtctctacaaaaaatttaaaaattagccgggcatggtgccatgcacctgtggccccagttacttgagaggctgaggtgggaggatcgcttgagcccaaaagtttgaagctgagatgagctatgatcaggtcactgcactccaccctgtgcgatgaagtgagaccctgtcttggaaaaaaaaaaaaagaaccatatatatatgtgtgtgtatatatatatgtttgtatatatataatatataaatatttgtatatatgtataaataacaattgttaaatctaagtaaaatgatcgacatacaaacaatattgtattatattttcaagttttctgtatgtttgaaatttttcataataaaaaaactgggcaaaattctctcacttccactcactgctcgaccctttcaggctggtgtttatctctaccttgctgctactcaaatgtttttttgcaatgaactttatgtcattaagtccattgtttcgttttcttcttacttgaactgccactagtagctgacgttgctggccagttctttcttgaaacactgtcgttttttggcctccaggatttggcctcttctggcttcctcccatccctccatcggctgctcttccacccctcagccggctcactccgcctttgactgaaatcacctggtcatattggagttcatcaagagaggtcggtcctggaccctcctcttcttatgctaccctttccttctaggggatcacacctgtcctgtggcttcagttcccatcagctggttactctcaaatttatctcttgcctcaaatctccagatttgaccaccttcctgcctggcatccctacttggatgtcccaaaggtattactaacttagcttttttttttttttttttgggagacagagtttcgctcttgttggccaggctggggtgcagtggcaagaccttggctcactgcaacctccgcctcctgggttcaagtgattctcctacctcagcctccggagtagctgggattacaggcatccgccacgacacccggcaaactttttgtattttcagtagagatggggtttcaccatgttggccaggctggtctcaaactcctgacctcaggtgatccacctgcctcagcttcccaaagtgctgggattacaggcatgagccacggtgcccagcttaacttagcatatttgaaacagaagtcatgatcttcccacagaagcagtatcatcctcagatctgaaccacaggggccctgccctggcccacatactttagggggattcacctatcacaaacaacttatcacacacatttattacatgacacctgggcacctctgtcactgatctgctgtcagtgctggaacagcacaacctgaaatcttacacatctgctcttgtaatcaacgccgttcaagccctggggaatggtgacttctgtaatctcttgccctgtatcctggaaacaaaagatgactatagccaattctgtgaaaatctgaggttgtgcctctgcctggattctgaagcatgtactgctttggagtgtagggaggatttaagcagtggaaacatgtaagtgaaatcactttaaccagcttgttaaatattacctctcaaatagcatgacaaagtatcatttcccaatagtgttgagtgtggtttttcttgtttctctttgttttagaggtatggatgtatgttgtgctgcatttacaacagttgcaaaggatagctgaggaacatgttgctgtattaaacaatccttattactgttaaatttatatgcatgtggtgggaggggtggtgagggataaaaaactacacatttacagtgtacactcctcctgtgatgggggcaccaaaatctcagaaatcaccactaaataacttattcatgtaactgaacaccacctgttccccaaaagcctattgaaaaaaaaattgaatacatgtaggtctagatataactcttgtgaagtatgatattgattctttatgttgtaatagatggacattgaatacgagattatgaatacaatcatcctcagtattcaccagggattgattccaaaacccccactgatgttcaaaccccttgtataacatggcatagtatttgcatataacctatgcacattcttccacatactttaaatcatccctaggttatctatggtgcctatcgcaatgtaaatgctgtataaatatatgttatactgtattttttatttgtattattttttctttctttccttccttccttcccttcccttccttccttccttccttccttccttccttcctttctttctttctgacagtcttgctgtgtcacccaggctggagtgctatggcaggatatcagctcactgcaaactctgcctcccaggttcacgccattctcctacctcagccttccaagtagctgggattacaggtgcccgccaccatgcccggctaatttttttgcatttttagtagagatggggtttcaccgcgttagccaggatggtcttgatctcctgactttgtgatccacccgccttgacctcccaaagtgctgggattacaggcgtgagccaccgcgcccggactggccatatatattttaaaaatatttttattcttcagttggttgaatccataggtgtggacctacagatacaaaatgccaactgtagtttaatttttataaaactatctgtcttagtccattcagactgctataacaaaataccttacactgagcaatttataaataataaacactgcttacagttctggaggctagaatgtccaagcaggtggtgccagcagatttggtagccagtgagggcacactttgcttcatagatggcgccttcttgctgcatcttcacgggtggaaggggcaaacaagctcctttgggcctcttttttttaagacagggtctcgctgtgtcacctaggctagagtgcagtggcgtgatctcggtttactgcaagctctgcctccagggttcaagtgattctcttgcctcagcctcctgaatagctgggattacaaatgcctgccaccatgactggctaatttttgtgtttttagtagagatggggtttctccatgttgaccaggcttgtcttgaactaccgacctcaaatgattagcccgcctgagcctcccaaagtgctaggattacaggcatgagccaccgcacccagcctgggcttcttttataacggcattaatcccattcatgaggacaggcccctcatgacctaatcaccttctaaaggccccatctcttaatatcaccacattggggattaggtttcaatttatgaattttaggggggcacaaacatttatgccatagcaatacataataaaaattaataaatatgtatatatttttttgagacagggtctcactctgtcaccaggctggagtgcagtggcacaatcatggctcactacagcctcaacctcccaggctcaggcaatccttctacctcagcctccagagtagctgaggccacatatgtgtgccaccatgcccggctaagttttctattttttgtagagatggcatttcaccatgttgcccaggggggtctcaaaacactgggctcaagcagtctgcccaccttgacctcccaaaacactgggatttcaggtgtgagctactgggcccagcccaaaatttcaaaaaaaagcaggcaaaaagtcagctttatctaaatgtgtttgatttaaaatattgatgtgtattcattatcatttatattttgtccagatgccgtgtctcatggctgagattccagcactttgggaggctgaggtgggaggatcactcgagctcagaaatttgagaccagcctggacaacatagtgagaccatctctctacaaaaactaaaaaaattagctgggtgcgatggctcatgcctgtaatcccagcactttgggaggccaaggcgggtggatcacttgaggtcaggagttcgagaccagcctggccaacatggttaaaccccacgtctactaaaaatacaaaaaattagcagaagaatgcttgaacccatatgtatacatgtatatatacatatgtgtatgtgtatgtttatatatatatgtatatgatacaaaattagccaggtgtggcagcacacacctgtagtcccagctatttgggaggctgagatgggaggatcacttggacctgggaggtcaaagctgcagtgaactgggatcatggcactgtactccagcctgggtgacaacgtgagatcctgccaaaaaaaaaaaggaaaaataaaaagagtgattttacagaaaaattgagattttcaatttatcacggcagtgccagctctgaattcctatgcggcaacgctggaccaggagctgctgcccctctaggaggggagggtgccctccagcctgttatagccttcccttggcacttggcacattacttgcctggcccttacaggaatttgaggtgcaaattgatctagatcattgaaggaagagtctgggtcttctcagttttggggcactttcgttgccaagtaaggttcttatgagatttttagaagttgagattaaaaaagagtttatatgcagctggaggtgatacctaacaacaaccataataacagcatcaacaacaaaaacagtagcctagagcagttactctaagccaggtaagtgttctaaagcacttcacacaacttatttactctcacgacaatgctattaggtagcactttgaatacacacattttgtaggtgaggaaattggggcatgtagctgttaagatttatatcagccgggcgtggtcactcatgcctgttcccagcactttgggaggccaaagcgggcggatcacgaggtcaggagtttgagaccagcctgaccaacatggtgaaaccccgtctctactaaaaatacaaaaattagctggacatggtggcggctgcctgtgatcccagctattcaggaggctgaggcaggagaatcgctttaatctgggaggcggaggttgcagtgagctgagatcatgccactgcgctccagcctgagtgacagtgagactctgtctcaaaaaaaaaaaaaaaaaaaagatttataccaatttataccgtccaataggaggcgtgagactcaacacagggtggaggagagaataggtcaggaaatcacatctctccacctgcacagccaccatcattgtacccttctaaagagactggcaacaactttcattcagcactgtcccattgattggctcatttcatgatcacagcaacccagttaagcaaatcctcacctttgcatcgcctgctttgtatcacttttctttaaaattaaaaataaaaaaaatggattacaaattcggttaacgcccatcccatttctctccttccttgtagtaattatcattctaaagttgttgggaattattcccatgcgtactttgcacttttaaaaaatgtttgctttcctaaacatataccactgttttgtgtattttaaaactcacacaaataatatcatacaacatccatttttgcaagtttcttactcattacattgctaaatatgtctataattcatttaactgctgtatagtatcccattataagaacaaaccatactttatttatccattttacttaacaacagttagcttatttccacttcttcttgacaattaactgatactgcaatgaccatttttatcctcgcctttttgtgcatgtgtagaaatgtttttctaaggaatagatctagaagcaagattgctgggtcatagggaatattcattttcagcattaactggtgccaaaattctcttcaaatttgttgtatctgtttacacttcaacacaaaatatatgcattcctattgtcccacatttttgtcaacagtgttagaataattttaattttggtgattttgtgggtgtaaaatggtaactcgcgctgtgatttgcatttctacattactggttaaattgagcatcttttcttatgtttattgaccattaggtttctcttttgtgactcacctattcacagcttttgctcatattctcttgcgttgtccttttcatatggatctgcaacttctttatgaatcctggatataatcctttgttgtttatgtagattgtgaatattctctaagtctgtggcttgtcttttactttacgtgatttcttttttttttttttttgagacggaatcctgctctgtcgcccaggctggagtgcagtggcacaatctcggctcgctgcaagctccgcctcatgggttcacgccattctcctacctaagcctcccgagtagctgggactacaggcacccactaccacgtccagctaatttttttgtatttttggtagagacggggtttcaccatgttggccaggatggtctcaatctcctgaccttgtgatccacccgccttggcctcccaaagtgctgggattacaggcttgagccatcgcgcccggcctatgtgatttcttataaaagcttaaaaatgttttaacgtggtcatatgtatcaatattttcctttattgcttgtgcatttatttatagtcgacaaataaaaattgtatctatggtgtaacaacatgatgtgtgtatatatatgtgtgtgtgtgtgtgtgtaatggctagagtaattactgtatctgttatctcacatactatcattttaaacgtgatatttgaaatgtactctcctagcaattatttttatttttattttttttttgagacaggatcttgctctgtcgcccaggctagagtgcagtggcaagattatagctcactgcagcctggacctcccaggctcaagtgattttctcttctcagcctcccaagtagctgggactactggcacgtgccaccacatcctgctaattttttcaattttttgtagagacagggtctcactatgttacctaggctagtcttgaattcttggggtcaagcaatcaagcaatcggcatcccgaaatgctaggattacaggcatgagccactgcgcccagctaatttttctattttttttagagatggggtctcaccatgttgcccaagctggtgtcgaactggtctcaagcgatccacccacctcagcctcccaaagtgctgggtttacagacataagccactgcagctggccagcaattttcaagtatacaatacattgttattaactctagtcatcatgttatacaatagatctcctgaatttattctacctaactgaaattttgtatcctttgactaaagctctccaatccctgcccacacccgccccccgccccctagcccctgtgcagccaccattctattctctgcttctgcaattttattttatttatttatttttttaaatttattttgagacagggtctcactctgttgtctgggttggagtccagaggtctgatcacagctcactgcagcctcaaactcttggattcaagagatcctcctgcctcagcctcccgagtagttgggactacaggcacgtgccaccatgcctggctgagtttgactctttaggttccacatgtaaatgaaatcatggtatttgtctttctgtgcctggtttatttcatttagcataatatcctctagttttatccatgttgtcacagatgacagaatttccttctttttaaagactgaatagtattccattgtgtatatgttccataatctctctatttattcattgatggacacttaggttgtttccatgtcttggctattgtgaataatggtgcagtgaacttgggaatacagatatctcttcaacatactgagttcatttctttcgaaatatacctgataatggaactactggatcacatggtagttttaattttttgaggaagctccattctgttttccaaaataggtgtacaaatttacattcctaccaacagtttgtgagggttcctttttctccacatccttgccaccacttgtaatctcttggtttatttttattttttttatcagagccatcttagcaggtatgaggtgatatctcactgtggtttaaatgttcatttccttgataattagcaatattgagcatttgtttttcatatacctgttggccatttatgtgtcttcttttgagaaatgttttttcagatcatttgcccattgtaaaatcagatttttggctggatgcagtggcttatgtttgtaattccagcactttgggaggccaaggcaggaggatcacttgagcctaggagttcaagataaatctgggcaacatagggaaaccctgtctctacaaaaaaattttaaaaattagcagggcacggtggggtgtgcctgtggtcccagctacttgggaagctgaggtgggaggattgcttgagcctgggagttgaaggctgcagtgagttattattgcggcactgtattccagcctgagcaacagggtgagaccccaacttaaagaaaaaaaatcagatttttggttttcaacaactcttgctattaagtttcttataaaaatattcaccccttatcagatgtatagtttacaaatattttgtccctttccgtaggttgtctgttgattgtttcctttgctgttcagaagctttcatttgatgcaatctcatttgtccaaaaaaattattgcccagaccaatgtcaagaagccaagatcatgccactgcactccagcccagcaacagagcgagactccatctcaaaaaaaagatctgaaattgtaaaaatactagaagaaaatataggagaaaagcaattctcctgcctcagcctcctgagtggctgggactacaggtgtgcaccaccacacccagctgatttttgtatttttagtagagatggggcttcaccatgttggccaggatggtctcaatctcttgatcttatgatccacctgccttggcctcccaaagtgctgggattataggtgtaagccaccgcaccccgccatttcagatcttatgtttaagtctttaattcattttgagtagtttttttttttttttttttttttggaggcagtctctctctgttcttcaggctggagtgcagtggtgtggtcttggcaacctctgcctcccagattcaagtaattcttgtgccttagcctcctgagtagctgggactataggtgtgtgccaccacccctggctaatttttgtgtttttggtaggtttcaccatgttggccaggctggtttcgaactcctggcctcaagtaacccattggccttagcctcccaaagtgctgggattacagatgtgagccactatgcctggcctgagttgatttttgtatatgaggtgagatatggtcaaattttattcttctacatgtggatatccagtttccccaggactgtttattgaggagactgtcctttccccattgtatgttcttggcatatttgtaaaggatcagttggccataaaatgtgtggatttatttttggcctctattctggtcttatatgtctgtttttgttccagaaccatgctgtttttattactatagctttgtggcagcttctgaaattaggtagtgtgatggctctagctttgttccttttgttcaagattgctttggccattttggtccttgtcttttgtggttccatatgaatcttaggattttttttctatttctgtgaaaatgtcattggaattttgatagaggttggatggaatctacagtttggggtagtgtggacattttaacaatattaatctttccaatccattaacatggaatatctttccatttatttgtgtctttaatttctttcttcaatgctttatggttttcagtgtacagatttctcacctctttgattaaatttattcctaagtatatatttttgatgctattataaatgtgattgctttcttgatttcttttttggttggtgcattattagtatacagtaatgctactgacttttgaatattgattttgtatcctgcaactttactgaatttattagttctaatagtttttttggtggtatctttagggatttctctatataagatcatgtcatctacaaagtgacaatttaacttctttctttccaatttggatgcctagggagcatcagtggctcaagccagctgtcctggtgcacagggaggcgaggctatgagttcgaggccaacctggtcaacattgaccaatttggatgtcttgtatttctttctcttgcctatctgttctgactagaacttctagtactatattgaatagaaatggtgagaatggttatccttgtcttgttcctgatcttagaggaaaatcttttaacttttcatgattatgtatgatgttagctgtgggtttgtcatatatgggctttattgtgttgagatacactttttctatacctaatttgctaagaatttgtatcatgaaaggatgttaaattttgtcaaacgcctttcccccatctattgatataatcatatagtgttcttcattttgttaactgcttgtacttttgtacttttaaaattttgtataagaaatccttctctattctgatatcatcaatatgtgatcttatattttctttgaatagttttcagttttgctttttactctagctacctgaaatttacttctgggtaggatgtaatgtagaatttattttttgtgtgtttgtttggatagccagttaactcaaaaccattgaactttcccactgatttatgtcacttccattatagccaagtctcatatctttgagggtctgtattagtccattcttgcactgctatagataaatacctgaaatcaggtaatttataaagtttaattggctcatagttccacaggctgtataggaagcatggctggggaggcctcaggaaacttacaatcatggtggaaggtgaaagggaagcaggcatgtcttacgtggctggagcaggaggaagagagggaagaggtgccacacgctttttttttttttttttgagacagagtcttgctctgttacccaggctggaatgcagtggcacaatctcagttcactgtaacctccaccctctgggctcaagcgatcctcccacctcagcctcctgagtagctgggaccacaggcatgcatcaccatgctcggctactatttttgtatttttgtagagatgatgtctcagcatgttgtccaggctggtcttgacctcctgagctcaagtgatcctcctgcctcagcctcccaaagtgctgggattataggcaagagccactgcacctggcctccacacacttttaaacaaccgggtctcatgataacttactatcatgagaactgcacccagtgggaaatccatttccatgatccaatcacctcccaccagaccccatctccaacaaaggggattacaattcgacatgagatttggagagggagggacacagatccaaaccctattaggatctgattcaaaaaagttttgttctgtactgtggtctatttatgtgtgcatataccaggactagactgttttaatcactctaagtttcaaccagtaaacttgtgacatatggttaggcaagggatctcatattcttctgcttcaagttttgttttttcttggccatttactcttccataagaattttaaggccgggtgtggtggctcatgcctataatcccagcacttgaggaggccgaggcgggcagatcacgaggtcaggaattcaagaccagcctgaccaacatggtgaaaccccgtctgtactaaaaatacaaaaaaattagccgggcgtggtggtgcgcacctgtagtcccagctactcaggaggctgagccaggagaatcacttgaacctgggaggtggagcttgcagtgagccgagatcgcgccattgcattccagcctcggtaacagagtgagactccgtctcaaaaaaaaaaagaattttaagaacagtctgtcaagttccataaaatatctgattggagttttgcttagaattgtactgaatttttagatttgagaaaaattatcagctttatatcaaacttccgtctttgtgagtaggggatctcttcctattcttttatatcttctttatgttctctaataaaactttataattttctccataaatatcatacacagactttgttatatttattcctaagtatcttatgatttttgttatgacaaatggtattttcttttctttttttttttttttgagacggagtctcgctctgtcgcccaggctggagtgcagtggcgcaatctcggctcactgcaagctccgcctactgagttcacgccattctccttcctcaacctccccagttgctgggactacaggtgcctgccaactcgcccagctaattttttgtatttttagtagagacggggtttcactgtattagccaggacggtctcgatctgctgacctcatgatccgcctgccttggcctccggaagagctgggattacaggcgtgagccacgatgcctggcctaaaatgaaatcttttatctgtttattgctgtggtgtaaggatattgatgtttgtgtattctccttgcccccggcaaggaaattgttatttctaatagttggtaggttcttgtgaattttctttgtatagtaagcaatctatgtatagtaattgtctatgtatagtgatggctttatttcttctttttcttcttgtgtcacttcagacttcttggcagaaaggtgaatagaaacagtaaaaactggtatccttgtcttgactttggaagttactttctattcctagttagctagattaaaaagattaaaaaagaaatagacaggttctcactatacagtggttattcacagcctcaatcatagagcactacagcctcaaactcccaggttcaacgaaccttaccaccttagcctcccaagtagctgggactacaggcacaagccaccacacctggctaatttttaaatattttgtagttcactacagcactattcacaatagcaaagacatggcgtcaacccaaatgcctatcaatgaaagactagataaagaaaatgtagtatgcagccaggcgtggtggctcacacttgtaatcccagcacttaggaagcctgaggcaggtggatcaggagttcgagaccagcctgaccgacatagtgaaaccctgtctctactaaaaatacaaaaaaattagccaggtgtggtggcaaatgcctgtaatcctagctactcaggaggctgaggcaggagaatttcttgaacccgggaggcagaggttgcagtgagctgagattgtgccaatgcgctccagcctgggtgacagagtgagactctatctcaaaaaaaaaaaaaaaaaaaaaaaaatgccgggcacgatggctcatacctgtaatcccagaactttgggaggccgaggtgggcagatcacaaggtcagaagttcacgaccagcctggccaacatggtgaaatcctgtctctactaaaaatacaaaaattaacagggtgtggtggcactcgcctatagtcccagctacttgggaggctgaggcagaagaatcgcttgaacccaggaggcagaggttgcagtgagccgagattgtgccactgctctccagcctgggtgacagagcaagacaccaccttaaaaaaaagaaaaaagaaaatgtagtatgcgtacaccatggaatactatgcagccataaaagggaatgagatcatgtcctttacagggatgtggatggaactggaagccactatcttcagcaaactaacacaggaacagaaaaccaaacaccacatgttctcacttataagtgggagctgaacgatgaaaacacctggacacatgtgggtggggggaacaataacccactgaagtctgtcagaaggggaagtggcaggagggagagcatcaggaagaatagctaatggataccgggtttaatacctaggtgatgggttgacaggtgcagcaaaccatcatagcacatgttcacctatgtaacaaacctgcacatcctgcacttgtactccggaacttaaaataaaagttgaaaaaatattttgtagagacgaagtctcactatgttgcccaggctggtcttgaacttctgagctcaagcaatcctcttgccttggcctcccaaaattctgggattttagcagtgagccactgcacctggcctccagttctggatcctgggtcttgcgacattattccatgctggcttctgaagtcaatgaggcaaaaccagaaaggggaactaaaaagttaaagagggagagggtctcacaggcaagatggaggaagcctgggatgaaggcagggctgtggacctgaatgatgccaggaattaaggaggaagtaacagtgttaggtaatagcacatgggattcttgggctgcagctacaggagggagaatcatggccttaattcatcacctctgaaatcctgaaatatctagcctcctgcccagatcctgccatgaatgcatctattcaaccactatttataaagtatccagtgttaggtccagggagtggcaagagtgagcatctgcagtcatagtccctgccctcagggagcttacattcaatggggcagacagacatcagtctgtacataatcatcaacaaatgtagaactccaacagggccaagtgcctctgaggaaaggtacaccttagtgtgagcgctcataacaggagaatttgaccctgaaaagaaggtcaggaaggcttccctgaggctattgagaaggtgaggcctgaagaatgaagaggagctaagaggagaggaacagaggaaggagccgttccacagagggtccagcctccctggagactctgtgcaggaggaagcacaaggtggacagcaactggagcacacgagtgagggggtgtggtgggagatgaggctggagaggaggggccaccccttgcagggccttagaggtcaggttaaggacttgggtctttaacctaagatcaatggaaaaccactgaataggtttaaggaggctgactgaaacaatcagatttgcatttttaaaggatccctcttaggtgtgtgtcatactgtagagaaggccattcccagcctcttcagctactgcaatgactcagagaaggccacatggtccacatggtggctagcccagggatgtggagggatgaaaacgagtggacagacttgagatatattagagcagataaaatggataggactaggtgctggattcaatattgagatgctcattctaaaccgcccctacatcaaatccttcgaaggcaggggctatgccacatgactatgatacccaggtcccagaacaactcctgacacatggtagactcaatacacatttcccgaaagggtggaaatgattagcagtctctcaagtaatcctttgaccactaagcgtatttaatttcttctagcatgtgtcagtaatcaacctccttggtacatcatagggagaaatattgccgagttccaaagagtatactctggggcaagttaatacaagaataaggtctcacttaccctataacatgaagagtaacagtaaactcgtaagaacaggacctggtgaagcaaggagtaggcacaggaagatggctcatcaaataggggcgccgggtgtagtgtgaacacctgaggcaggaagaacccagtagcctctgggggttgggtgggattagttgggggactaggatttgatggtagggggttgtcctggagatctctggaaattaagttatctattttttttctgtttttatttttataaaagaactcttaagggcatttttttctttgtttgttctgttttgagatagaggttcactctgtcgcccaggctggagtgcagtggcgtgatctcggccactgcaaactccgcctcccaggttcaagtgattctcatgccttaacctcctgagtagctgggattacaggcatgggccaccacgccttgctaatttttgtgttttttgtatagccagggttttgccaggtttggtcaggctggtcttgaactcctggcctcaagtaatccacctaccttggcttcccacagtgttggaattacagccatgagccatcatgcccagcctaagctatcactttaaaatgacccttcaagaaagtcccaaggagtctaatccatccacgacaacagcacgtctgagacagcctagtgaaatttctccgatggaggacaggagatggaaaagtgccccaggacctcttatttatataaaaaacaaaattttttaagaccctgagaagtatggattcttctccagagaaaagttcctggcttgggagctcccttaggacttggcactttggtctagagtgaagtggacctggccattccagctttgagtgggttcaggcgagacactcgagctaccccttatggttgctctgaaggtcaccctggctgggagtgggtggatctctgctctgttatgcctcccacaggtggaggaagtctgtctctgaggctgccctgccaccctcatagagcgctgcagattgggggcggtgatgcagccacaggggctctgattccctgcctccccactgtgttcatctcattcctctccacatatgaggcctggtgtcatggcaggtgggtgttccaagtgaaaccacagccacagaggcaagcagtagagcctgtccctgatgtggccctggtgatgctgcaccagcctggggctgtatcagaaaccatgcctgcagcctttgcttctgcagacttgctggtgctgcaccagccctgagcaatgtccatagcccttgcctcactggtcactgtgatggggacgcccccaggtatggttctgctgctggtgttgcaggttggagtgggggccagcaccctcatctaccacaagaaggcttaggtggcacagacgtaaggctgcttgcctgtgtgtagagtggcaggctgcaacgggctggagccttggggagaggcccttgccacactggtggcagtgattgggttcaggcaggtgtgtgccgcagtgctgggccaggtgtgagctgtggcaagagctgtggccacactttctgcaggagtagggcctatcacctgtgtgaaagtgttcgcacagggtcaggtgggccccttggctgaagtacttcctatattagggggaggagaagggccccttgcccaggctgtgctgagagaggtgagagcagtgggaagagactccacattccaggcaggaaatttgagtggatttgtgggtggagatgggggtcccgggtaggggagttggggaagggttggttgtgacagctggcaggtaaaggagtgccatagtaggtagagggctgggtctgtcctctcttctcctcctcctctccctttgctcccagcctgcagggagaggggagagaggtgagagcagcatgggggaggaggaagcagaggagacagaggtgggagaggagaggctaagccccacacccaactgaagaagtggttggcggtttcagcggcacctccctcctcgctgaggtggactgtgaaggtggagaagcccagagcacagcctcctgtgagcagcttcccagggtgttgagggctgccaggcaaggacagggccctcagagttaggccttgcctgggcaggggtctcctgggggaaccttccctcagggccctgaggctctgggctccagagctcagcttccgcgttcagatacatggtctgctctgctttggagactgagaagcctgagaggtaaaatcgtgctgggtggtaggtagggtaagggagagggagcttccccccatctccctcacccactgcagaaaggcttctctgtttccttccccagcccagtcccacctcctctgtgaggccgctcctcacctccctactggcctgcagtgatcctcctgcttgggagtcacagagcacccctacacgggccctttgccattctttatagtataaggcaaggccgtaacattttgtggggcatcttcttcagtgtcctcagccttgtgtgaacatcagaagcacttgggggcttgggaaaatgcaattgctggccccatctccagtttcttaaacagcagatctggggtggggcccaagaatttgcatttctaacaagttcccaggcgatgctgatgctgctagtctgggatccacactgggagagccactgatctgttaggcgtgtaactttacttgtattatctctcaattctcagggcaacctgttactctcccccattttgcaggtgaagaaacagagggaagacccagtgccttgtgcaaggtggctcagtttgtaagtggcagagccgatttgaacccacgtttgtctgactctaatactgtatcaaccctccttcctctaccctgttcctctgcattgtcaactattccacatgtatcttgttcctcaacaaaatagtaacgttttcttttgcatactttatatctctcaccttgcctgacccagtaacataggcttggttgggagggactgaaggacttggaaaggaaatgccccagtggagccaggatggaaatgggttcctctgtgtctcccacatggtgtcacctaaataaacagccatgtctgtgaggttcagtcatggggagaggagggcaagagagcactcgcaccaagcgatggggttagggggacacgaaaggaaatgtgataaatagagaggggggcgtgtggggcaaaggtgaggactggggacccgggagggggcaggctgtttcagagtgaaggcaggacgggcagcagagacagagaagaggctgccgggtggttagggctggggaggacaaggagggtgaggacagacgatcccggcagcccctggagccagaagagaagtcaggttaactccagacttttggcttccacctctgtatctcacccaactcctccccacctgcttctctaccctgaaactccaggaacaacgcccacctgcctcccactacaacttccccttataccgtacacgtcctggatgcttggggtccgggaggaggggagtcaggatcacgggttccagggaagtgagtgtagaaaggggctcctacgagggtagaagtgggtgttgtctgcttctgcaggaaaggggccagccagcccaactggtccgcagtacttgctggggctggaggatgcccacctgcatctacgggattgagggtaccggagaggaggcgaacaaacgagaaatcccaagggtggagaagggagccatgggatcggcgggcgggccgcgcagctgcggaactgggagggccaagcgggctttagggggaaacacggccggctcctctgccagtgagacagagaactgagcatgggggaggaatttggggccagaggggctgggggtacccagagcagaggaaacaggaagtgaggggcagagaggttacgggtggtggaaggaacagcagtcggttctggagaggcgattcctcttccccgaatacctgcactgccccggaccgggagtgcagtcgtgcgcccctgtccccccagcctcaggcttggtgcccagccccgctcgcggaactcgaggccagtaaggcagccgcggctttccttgatgcccccactcctctgctctcagccgctgcctggacgagcacagaactagtgttcccaggcgaccctccctccgctcagccccgctgcccggcgggcaaaggctgtgcactcacactccgagtctgcagcccagcctgcccttttttgggaggtggcccggggactgggatgtcgaacagggagcttctccgcagtcctctccacctccctccctctttccagctatagaaaccggctgctcgcagtgacttccaaacatcacggtcattcccacatctacacacatccctttctcttttgagccattttcctgctttccctttggtgttgaaaccctggatttcagcctgggcgactcaggttttaggggggaaagtttggggtctaacttggcacctctgttttttatcctctcttccagcttcatagatggttcctattttcatacatatttgctaatttggagtttccgacgacatatctcgaataacccgacattttctccccatttccaaggctgattttacattatttctaggcctccctccccaatctattttcctttctttttcttgtacacccctgataaacagacacacagaactgcaggtttcaaagaggaaaaaagcacgtttgttgttggtaggcgggcgtgaatgggagggttcttcaccttctccaacacctcgtatagatgggacgttgcagggcaatagaaaaggcagcagatgggggcgtgttttgccccactctgtacaatatagaagaatctcatatagatactttgtataaaagccacgtgtcctcatttgtgtcctcttattggctggctgggctgggggtactgggggacaaagaagctggggtgatagaccaggacacagggataccccatggtccccttcctctggctgtcccctggtggggtcactttggatccttggtgggagcatagcacagctccagtggccgggacaccttccagaatttctcattcaccagctccagggtcagcgagccattcaacgtctgaggagggggtaaaagggagagaggggaaaagagagaggaaagttggagaagatggaaaaggaaatgaatgagaggcaaaaggtgaccaagggaggaggaaagaaaaaaggaataataaaagcgataaggcaaaaaaggacatggatgatgggaaaggagaggggacatagaaagagatagaggatgtataggggaagagtgctgatgagttagaccaggctcatggttctatgtggcccagaccaccctccctcctctcccctcttctaccactgccctcagaagctctcaccgtgaacgccccgcctccaggtgcgatgtagatggtgtactgcttttcactgacgccctccaggctgggcaaagcaggctcctcaggaccgtcacctcctccggcacccccaccctccccgccacacccatcaggtcctccggtgtcagaggcgccccctccaggccctcctggctcccctgcttcctgctgttgcctccgctcgagggcaatgcgcagggccaagtacttggagaggtggtccactgtggcattcccagttgtcttcacatacctggaatgggagggaggacaggcttagagccagagcgcctcagatgaggactggaggtaggggctttccaaaatggattctgggttggggtggtattttgggtttgggcaaagcccacttctgatggaaatctaggtgatctttggtttctcagtggctggggaaagacagggctcctcacctcgtctggcagtattctcccttctccacgagcagggggtggggccggaacacgagctcaatttctccacctggctctggggggctgggggccccaggagggcttggggggcccagcgttccccctcccagagtccctccccggtcaccagagtcttccgaaccggcacccccacccaccccaccagtgccgcctccccctgtccctacactgctcccccctgcgccccctccacggggtcgcttgggagcagggcctggggcagagtcaggggcggagtctgagctcacatcttctccatccccttctccctccccgggctctccttcccccccactcatcgttgtggtctgatctgaccctggtatcggccgcctcacacgctgggccctgtagaagcaagtggttaaggttagaaggcatccaggataaagggcttagactttaaacttcagagaattaagagataagaaaaatcctaatgacgatacctaatatttattaaacacaatgtgctaagcactcagtatactaagtgttttgcaccaatccccttacctaatacaatgaatcctatgacacaggtaattatattacctctattttatggctgaggaaactgaggcttagagaggttaagtaacttgttagtgatcataggctgtcacctctcaaagtgcggtagcagcatacacatcccctgtgagcttgtgaaatgcagactctcgggcccaactctagacctactgaatcacagtttgcatctgaagatctacaggtaatctggatacacatgaaagactgagagatgctggcctaggaggtgatttaacttccagcagtatgaatccggggcttattctcaaaatcgctctactgttctaacttctagaaagtcatggggtaaactacatttttcctttttttttttttgtgacagggccttgttctgtcgcccagcaggctggagtgcagtgtgcagtggtgtgatcatggttcactgcaacatccactttcttcccaggctcaagtgatcctattacctcagcctcccaagaaggtaggactacaggcatgtgccaccatgcccagctaaatgtttaatttgttgtagagatgagatttccctatgttattcaaggtggtctcaaactcctgggctcaagtgatcctcccatcctcacctcccaaagtgctgggattacagatgtgagtcactgtgcccagccctatatttttcttaagaagagcagggccagttgtttactaagaaactgcaatttacacccatgatttccagccctaatgatcagtctgtggtcagctcctaggatgctgaggcttagaagctagcaggcaacaaggactgacccacggacccatcccatcagttctgcttctctcctgaccctcacacctgtgcatggcctgcatgcgtagcccctcctcaatgctggagctcaatgcctgctggttgtgcaggcggctcaggcggataagcactcggtcttgatgggcctcgtattcctcccggctaggatagatcttagagatcagggcatcaaagttggggtctggccgtagggatcgcttggacaccagcttctttcggcaggtaggacactccttgttcctggggtaggagaagggaagccctgagtggtcagtcaagggaactgaagcctaggctgaaccaagaccagtgagagggccctaactttgtaccccttcatctcatctcaaacatgtctctcctattacccgctccgtagggctgtgacaatgcagtcagagcagaatctgtggaggcactccttggtggtcatcgtattcttcagcatgtccaggcagatagggcacatgagttctgaatgcagtgaccgaggggaaacagcaatctctgtgccatccattatggcttcctgaaggcatcagtgagtagaaaggtggtgtgggttagagggaaaggggttttagaaacagcagcccataaaataagaattttgagaaatacagtgagaagacccatgttggtctctataggagacaagaattctgagaaagagaaggactgatgacttggagcaaatggagaaaagacagactttagtgtccattaactaagagtaggagctttggaataggaggatctgaggtggctaagtggcctaggagtgaagatggcacaaatctgtggttgggaaaaactattcaacaaaattttttaaagtcctggtgctacctgtattagaaccccatagggtgcctgttaaaaattcagattctgagaacccaattcactactgaatcagaatgttggggggcatgaagctctgcttttaataaactcccaaagtgagtcttatgtgcactgacttatgacactgaatgaggaacagggaaggtaatttttgtgtttgtgatctttcaaatgaagataataatacttgttccacctctctggcagggctgttttgaggattaaatgagctaaatgcgaaagtgctttggaaagattaaggtgattcaaaggtagggccaggcaaggcagaatagagcaaattacggaaaagaagctgtgtgatgcggtctgtggatataagggtttgggggagggggtaagcctgaaagggagaatgcctgtcacctgcggggtccggtgcagctcatacagactcagttcccacgttttgctggcattctgggcattcgccggcgtcgtcatggtgaccgggcgcagaccccccaccagggctccacagccgaggagaaggcgaagaaggctgggggtggggggaaggggaggagggcgtcaggggggccgcccctcgcgtagaccccgcccctccagaagcgcccctctccgcccccgctcccgcccccgcgccggcactgcccctcacccagctccagccgttcgcgctcccgccgccgccgcgcctctccctaggcccgggctcctgggccaagttcgctcggtccgcaaccgctgctcagacagcagctcccgccaccgccgccgccatggcccgggcgctggggccctacgtcacttccgcctgctcctccgctacacccgctccccccgccggcggagacgtcacccaccattcgcggcgcgggtgggacgggacgtggacgccgcggttctcccgcccacgggacgggctcgtcccgcgtgaggatcctgcgtcccgggagttctgcgccacttagggaaccacggtctccgcccccggcccagcaccgtcgcgcggccaacaaccttagcctcggttcccttccagaggcccccacgcggggcctcagctccggggggccggggcctggaatatctgggaccccaggaggggacagagggctcgtgaaaagggctacctcccccactctgcgtaccctggcgactctggggatcaacccccctcacttctccgtaacccccattccaggatcccgggggaaaaggctgcaaaagatctgccgctttagccttctagtcctgagaacacacctaggtcccgatgtgcccgggattccccttaccaccctggggactccctccaccctctgctttggctctccctagaccctccgacccgctctcccgctcgaggtttgggggcggcggctcgggacgtccagactcaactctcggccggagccatagactcgagaattgcgtttggacaatcaggagccgcggcccggggcggggaagggagggaggcgcacgggaggaaagggggaatggagacaccacgcggaaacagggacatacacaagatggagctcccattgggaagggggggtgcgcgtgtgggtggggtacacaggggcagaatgtctggagtgggaagtgggcagaagcctcttcgaggactctagagtaaacgaaggggatggggaggaaagagaagaggaaggggcagagcgatccccattgagtgtagggaatgagagggatacagggcgagggggtggggggcagttagagaccctgatgggcatcttgtccccgcccgagctgaggctcccggacttgggctgcggctgccagggggtggcctgtccctgggacaaggcagcagtgggtgccctcgccccccaccccagttcccccctacttccctgtcctctccttcagtccgtggccagtccttatgtgggcgccagagtcgattagcgcagacccccctccccttcctcctcctcttcccagccccctccctcctgctctctccagcccctttcatcggctggttcattcccctaatcctggccccctcccctaatcccccccatccgaccccaggccggctgcagctattgtaaggtggagagaaaggggagggggggactcagagaaaggagaggggtgggggagggccacctgttccaagaccccctttcaaggccagactggacaccaagatggggccatgaacaaatcacccttggggaccataagaacccagggagttggggggaggggactggtgctgcagaaccagtggaaaggggtgacgcacgaacccctcccttcaaaaagacccggagtgtcacgcatacacagtgacacatactctttcctctcacacccggcggcgggggttgccctgggagaccaggcagagaaagggaacaatccttcgggaaagggaaaggagggggaggtggggaagggtctgagggcttggacacaagaagagccggaggtggcagggaagaggacttggaatttattagggtcacaagcacccctgcttcccatattcagcattcctgaaccatacactgccaccccttttgtatcctgggaacttagagtcctcatcagcaggaggccaggcagagtggtgggggggtgagcagagtccagggtccttgaggcagttacatgaaaagacctcctgggaggggcagaaacatttggacagatgcatgggtggagacacaaatgggctagggggtacccacttctgtccctggccttgggaacctctgcccttcccagtggctccagactccccttacttgctttctcatatagtctgggttctacttctctgccctctccctccccatgctggcctcataccagtgacttccactgaggtccctgtgatgtatccactatcttcagatgccaagaatgcgaccacatctgccacatctatgagaatggtggggagagggcagaattctgctcactcccatagacccaaaacagccataatctcccaccaaagacatccctccccacaaacctctccacagacaccaaccaccagtcccctagaaaatccccaaactttggggatctcttcattcaggcccccttcccagggaccccactacattcagtgctcaccctcagggtcccccaagtgtcccatcgggatcatttcagtaatctgtaaggaaatactcatgtgggtgaaagcttcttttatggatttttttgaagactgagtctgtgacccttttttgtcttcatttctcatacattcattgaatatttaatgtttgccaggaactgtgcccagtattctctctctctctctctctctctctctgtgaagcccagagagattgagtctctgaatgattctgccctccacccacagcctcctaccttgtccaccactttctgtggcactttctgtgtcatgggtgttgcaatgaaccctgggaggacagagttacagcggatcccatgtctgtgggaaggagagtggctgccgattctggagagggctgaatgctggtacctccctcagaccccccaggtgctccccagcaccctcaagcatctgaccaaccgtccaagctcccgggctgcggtctgggtcagcccaatcactccagccttggatgctgcatagtttgtctgccccacgttccccacctataggtgagtcagagatgtggaatgagtcaggagtctcaaggaggggttctcctctctataccacttggctggctgacctcgtccaactcaacctgacctttcctacgatgctactgatgttgatgatggaaccacgacaaccattggacaccagggcttgtgctgcagcctgagtgactaggaaggtgccctggcgggaaagggtaacaagggagaaaagatcagctggggtgacagccctcctccaactccctccccaggctaagggggccaaacgtcgcaggttcagagatcgccaccttgaggttgacagctatgactttgtcccagtcatcctcagacatgtgcagcagaaactcatcctgggtgatgcccgcacaggacacaacgacagatggtgggcgagaaaagcaggcctatgggagggggaggttacgcatcaaaaaccccccacaaaaagccggggcagtggaggcaatatcagagctttagagggggaaagtggcctagcgttcacctgcacttgttccagcaggcacctggcggccctggcctcagacacgtcagcctggaaggcagcatggttccctcggggcggcccctccttgctccctggcccgcccagcagccgcaccgtctcctgtgccgctgcccggtccaggtcgcaggcagctacggtggccccctctccggccaggcgtacactgaccgctcggccgatgccgctccccgcacctgaggtaggacagaacacgccggaccgggcacggggaggagagggcagggatcagaggtcacagggcagaaagtaaaatgtgggtaaggggccagaggtcacagcggccgcgcactccaagggcacgcccctgacctcactccaataccccaaaccgcccggggaaagaaccccctcaacctgtgaccaaggccagtgcggagcggagtcggttctggagctgagacgccatggcgggctgtgggtgggtgggaatcccagcactaagccaatcccagcgcagaggggcgtggcaagggcaaagccggggccaatcaaaggcccgccagccttaggccatctgcggccaccagcgcaggccgacctcccaccgagggggcgtggcccgacactgctgcttaggggccccgggtgtggagaagacaaggggccccattccccccaaaaagacaaagactgcatgtggggcggaagatcggaggtctttatttccggttaccacccctccccctcgattcaaacacagtgatataaaaggaatagaaacaaaaaaaatcaggccatgagaataccaactaaccctctcccaccccatccccccaatcactcccaaatcaggacacacgattgatgtttgatgtttatccccgactcctcctgttaccctctctgtccaggactctggtcttccctgaagcctccaccaactggtgggagaaaggaaactggaccttggagaacttcctgtgtagcaacttggttctccgagaacaggtggggtaggggacaccaggtaggctgccatcaccccctgtcccttccagccttcttcatggccccatttagccttccaaatgcaacatggtcagacagtgcccaacactatggtccctctggcctctcattctcaccgctccagcctctgtaagactgccagcccttgaaggccctaatgccaaagtaaccattctcccaggctacagttccttcctttggcagatgtccctggccagggcccccaacctctacgcacccctgacctggagttaggggtagaggtttggggcaggggtagtttatccacccctcactcaaggtgggcaatcagcaccatcatgataactccccccagcagccccagcacctccagaagtgattgcaatggtgatgcctccctcagcagctcgggcaacacagacactgttgctacgtagataaagccacctgcagtaaatggcaggacccagccaggacctgcaccacctgcaatttcactgcccactgctcctccttcagtgagaagggcacaggctgtgcctgccagtgcccctactgctgtcagtagttgcagacgcatcgcctgatgggcagaaaagagaaaaaggcactcaccaatagctaaagattatcagtggtttagaagtggctggtggggtataggtataggggacatggatttggaaactaaacatcaaaataaaaagagaagagggagcagtctagaatagacaatttctgaaaaatcttaagagatcagaggtcctttccacagactttctgattgagtaggcgtgtgtgtgtaagactccactaaaccattcagatggtttatagaccagtttaagaaatactgagctaaaggacaaagtaaccagaacttcttccccctcatttctagaggacttgtcaatgacagtatgaattgtttggaactaataagaggctgtttgggtttagggtgagtgaggagagataaagggtttgaggcagctgtgtttggcagacatcaccaacctgctttttgctgcagccagactggaccaagatggcaaagtctccgacctcgtggggcacttcatgtagcaggacagtcattgtggtcaggatccctagtccccggccccctcgaaaggaagccccaatggccagaccatcagtgaagttgtgtgccaagtcagcagccagattcaggtaccccgacacacgcaggtcttgtacaggacaagaagagaaaatgatcagaggcttccatcaccacttgttccagtcttggtcagctattctcacacctcccctcagagaccactttacacccagtcctttagtgtttctcagatacctgccattacccacagcacatattccatgtgatttgtgatgatgtcccttgcccaaatttatcaccaactctggcccttacctaagcctcttttttcttcttcagcgttctgaggtctcactggcccatctttgggtactgtgctccctcctcgcctcttctgaacccctcttgtttccttttcttcttcctctgagctctgcttctccttggtagaacgctctgagggaagaaaagagttggtcagagtggagaacagatcttccaacatgtcctctccctcctgagggccataagatgaggagattctgaggcaggcaagtcagctttcaggaaagttgttcctgggctcaccttgtcttccatgtccatgacttccacgtgtatgactgtgagcgtgtccatgtccatgactgtgaccatgtcctcctttcacatgtctcacaaatttctccacgacaagaaaggcaacaattccactgagaacccacagtcccacagacagaatggggccctggcctgggaatggaggcattgagacattaagggagatgtgcattccagactcctcctcctcaagtgcgggaggtgaggaatagggagagacggaccttccccagcaccccaactcccatccccatctgtctcttcctcaccactgtgggagtgtccatgtccgggttgctccagagtgtggtgagaatgaggttctggaagaaggggggaaaaccagatgagggaatatctgacacaatgagtgtgtatttgggggaatatcgaaaggtcagggatcataaaggagaaagaacccttttcctccaaagaacgaaataggttagatttgaggtagaagtcagaggttacttaccaagagcatgaggaatgaggtgcaggaaagcatctcccaggagcccaccggaagcaaaactgagcaagatctgaagtagagagcgatgccggggagagttcgactccacggggataaggaagaggacaaaaaatggagctgctgagatcagcactgtggcccccagtgcctggtgagggagagtcaaggtcaagtactgtggagtttcccaacaatccagaaccagcccttctctctcccatcccctggagactcacataagcccagagagtgacagcatccaggtcctgcttgatgcctggagccccagactccccatagcctccatggctatgctcatggtcatgtccatgtcctctgtggtagaggctctcatgggagtagccatggctatggccatggtgtaaatcctcatgtgaatgtccatggtcgtgatcgtgggtatgtccatgccagatgctctcgtgagtgtggccatggccatgggcatggctgtggccatggtggaaatcttcatgtgagtgcctgtggctgtggccatggaagtcctcttgcagatcgtcgtgcaggtcgtcatgacccccgagtccagccaccagaagccccaaggtcgcccaggtcagcagtcccacggccacccagtggggggcccccaggcctctggccatcacgctgaccagagggacagaggcagtgactccacttgactcaactctatacctacacagggtccgctttactccaatcgcgccctccgtccacctctatgggccgctctcccattcccttaagttcccacctacattgttcccaagactagttctctttatcccgaaccacctcccggatgtagggccctgggacactaatctttcaccagccactttacagactctctgggccctcgtctctacgactcattaggtgaggaaaaggcctggaaaggatggtagagaaaaaacagagaattctcaccggctccgggatcctctcctttcccggtttgcttggacgtggcagtcccgcctttagatcccgcgagaacaggaagttccgttccaccttcgccctaatgcctttaccaatatggcggcactccggtagcgacgaatccatcctgcactgacacgcatgcgcgagtgtggaggtgatttgaggggagggtgggcgaggcgggctaacaggccggaggagaccgcctcctcggtttccaactagacgagggggcgggaactcgcgccgagacttcccgtctgtacaaagatggctgccacattggcgctgtcattttggtactgagcagagcgacgggcttaattcgacccaatccaggccagagtctttctctcaggggcttcctcgtgctcagctaatcctccgatcaatccttgggaatccctgggacctcttcggtatccctactctcagccagggatcatgtcttgggccgctcgcccgcccttcctccctcagcggcatgccgcagggcagtgtgggccggtgggggtgcgaaaagaaatgcattgtggggtcgcgtcccggtggcggcggcgacggccctggctggatcccgcagcggcggcggcggcggcggtggcaggcggagaacaacaaaccccggagccggagccaggggaggctggacgggacgggatgggcgacagcgggcggggtgagtgccccagcagaagggcaggcgagccagtgaccgctttatctgcgacccctcccccacaccctcccccggtgctcttttccttgcgctcccgcccccttgtttgtaaacacgcgtcccctccctcccgagggccttagcaccctcccccccggggcggggcggggaaggggagcttccgccctcctagctgtgaccgcttgaggccttgggcaccggaggtcgcgggcctgggaagggcacgattcctcttaaacctcaggactttgggcgtttacaggcagatcctgcgtcttaggaggggtctctcctgcctgtctctttcccttgcacgctctggctacctggctttacgctgggaatagaggggctcgatggtctaccccacgtgctgccccacccacgagacaggtgtggctttgggatgacctggtattcattcaaatggattggttggaaaattttcctcacctgaactatcctcctctccttgtcaactccctcctctcaccacaatgaggagttacgctgtttttgggtttttttagccagtcaaatatagcagtgggaggttgtataccaattttagtgacacaaatgttaataagttctgataacccactaccatcggaccagccggagttacactgttgtttgacagcagggtgtctctgaacttggggatgggtggagtgggctgggtccggcacggtggggtattagagaattaaagtctctagttggatgtttgaagactcattttctttttttgtctcttctgtctcttgtgtgtctgtgtgcctgtacatacccctccctcagactcccgaagcccagacagctcctccccaaatccccttccccagggagtccctcccccttctcctcctgggccacccctacccccttcaacagctccatcccttggaggctctggggccccacccccacccccgatgccaccacccccactgggctctccctttccagtcatcagttcttccatggggtcccctggtctgccccctccagctcccccaggattctccgggcctgtcagcagcccccaggtgagaggttgtgaccaacttactgcctggccactttcattttcttgttttccttgtaaccccagatccttgtgtgaacttccccatggcccattgaccttccaatcctctaaccttgtcaggcctgtggtctttatgagaccccttgcctttcctgaggtgactgatctttcagtgcatgcttcctcccctaaaagaactctaatattctttgtttttgtgtgtgtgtgtgtgtttttttttttttttttttttgagatggagtcttgctctgttgcccaggctggagtgcagtggcacaatctcagctcactgcaacctctgcctcctgggttcaagcaattctcctgcctcagcctcctgagtagctgggattacaggtgcctaccaccacgcccggctaattctgatattcttgatgtccttttcatctatctgattttctgcccttttgatcccatctgctttcccaagacacctgcccttcagggtcactgtgttgcacaatttcagggggggcctgtttattcactttggggttgtgctccagggatggcctttcacatagactgcagtgtaaatgacagcctctggaatgtgcattgcagggccttgcttagtggtagggaatgatttccatcacttctgtgacattctgcttcccaataagtcttcctgtgacttccctatttcccccatcccagattaactcaacagtgtcactccctgggggtgggtctggcccccctgaagatgtgaagccaccagtcttaggggtccggggcctgcactgtccaccccctccaggtggccctggggctggcaaacggctatgtgcaatctgcggggacagaagctcaggtatgtggctcagaggatgaacagagagggagagtctgggccatgtatcatcacctgtgggattcccagggcttatggagtttggtcagagcaagtgacctgggggaggcctgatgggagtaaagaagctgaagctgagatgtaggacgcgattggggggaaggtcagagggaaaaggaagcagcgtgtagggtttctgaacagtgaggagactgggactggatcatcactcagctcctggttccctatctctgtatttggcaaacagggaggactttaagttttgctagggggagattggaaacagactaaatggtgaaggtgtctccatgcaaccttcttattgctcctcccctttccctgtaggcaaacactacggggtttacagctgtgagggttgcaagggcttcttcaaacgcaccatccgcaaagaccttacatactcttgccgggacaacaaagactgcacagtggacaagcgccagcggaaccgctgtcagtactgccgctatcagaagtgcctggccactggcatgaagagggagggtaaggacccgccctgcccaggcgtcttagaccacatgcccttctcccttatcccactcagactgtgtacctctctggaagggtggactgctctctctcctctagagggcgatatttgatttctctctcccttcgcagctctcctccctgttaccctgttctggcccttgagtttccttcttaatggttaggcctctgtggcctgcacatatgacccctccctagactgatcctaggataggataacttttccttagccatgatgggctgtctccccatttctaacctgagtggttcctcctctgattccatggaccttctctggtctctgtctcctgttatctgtgatctttcctctaactcctgggactgggcactcttaagcttacagactttactgaagacctcagggcttcccttccttcttctgtgtctccatcttatcttcttaagtcagattcctaggattctgagagacactttagagcatatcttggtcaaaacacccactttagagaagatgagcctgaggcttggctttcccaaggtcatgcaacaaaggagtggcaggcaggtttgggatcagaacccacatcttcaaagacctaggccagtgctcctttcactgcctatttgttgagtcagaagagcacaagatttgcactcagacacacttagagtcagttgtatgacctgccatgtattatatgaatttaagcaaactaatctctttgaaccccgagttcttcatcttaaaaatgagaataaatgcttccagcatcattatgataattgagtgaatggtaaaatgtgcttagcatgtttcttggcatattttatttaaaaaaattttttttttcaatcagctttctcaggttgaatcttggcatgttttttttaaccatgtagtaggctctccatttaaattcctccctaattcttttacctacctcacccttcccgactgacttacctgcccttttataacccttccttcagggctgcccccagtccaccctttctagtgacttccccaattcctataaatatctcccaagggccatgagatcctgatgaggccgtaaggatatttgtggaaccccttcatggctggctgctgactttccattttttctctcccccttccccctgcagcggtacaggaggagcgtcagcggggaaaggacaaggatggggatggggagggggctgggggagcccccgaggagatgcctgtggacaggatcctggaggcagagcttgctgtggaacagaagagtgaccagggcgttgagggtcctgggggaaccgggggtagcggcagcagcgtgagtgttggggtcaatccactctccttcgtgatgggggttgggggaggcagtctaggtctgttctacatcccctccccctcctttcccctcataaccttcctaacactacttgggactggaggtgctgccaaacaaggtctttcaaacatctgaggtggatgtgatagctccttctgtctccactccccaaacaacccactggcagaaccataggcatgtcccaaataaataattgtttgcactaatgccagaagagaagactcacttacagggattggtttggatggggctcacaggaagactatatgtaaggagggggtgtcaaaagcctcttacaagggggctcccagcatatctcaaaatcttccataactcttacccccgtcccctgcagccaaatgaccctgtgactaacatctgtcaggcagctgacaaacagctattcacgcttgttgagtgggcgaagaggatcccacacttttcctccttgcctctggatgatcaggtcatattgctgcgggcaggtcagtgaccttggatccctttgacttcttgacatttgacccctctttgacttcccgatctttagtgaccccagtggccttaccttgcgtacccagggagccaaacttgctgacctcgccacctcttttctccttctcttccactgatgtgctttgaatcccttggcctgatttctggctcctgacccttgctgccccacccaggctggaatgaactcctcattgcctccttctcacaccgatccattgatgttcgagatggcatcctccttgccacaggtcttcacgtgcaccgcaactcagcccattcagcaggagtaggagccatctttgatcggtcagtggccctcggctaggctggcatgtagatagagggggtggggctataggctggtccgtgtccaaggctggctgagctgtgacctttgagtgacctgcaggtccctctccagggtgctgacagagctagtgtccaaaatgcgtgacatgaggatggacaagacagagcttggctgcctgagggcaatcattctgtttaatccaggtaagaggaggattacctttgtctctcaaggccaaggcaaccttggagcctcctcttctccgagactcctaagttacccagctatccccctcagtaagaccctcaacctggaaatctcccaactggccgaggaaaaacccacatccacggatccatcccacaaacccagtgggccctgcttcccttgccaggcctctggtaaagggcaagcaagtgcagcccaaaaggggcatcctgtggctcacatctgcatggccatcctgatttggtttgtcttcatttctcttcctcctctcttccctgccatcccagatgccaagggcctctccaaccctagtgaggtggaggtcctgcgggagaaagtgtatgcatcactggagacctactgcaaacagaagtaccctgagcagcagggacggtgagatggggctggggggcactgaggctcccttgggggtggggagtgctatgaggatgtgttcagggcccgtgtgcttccagctctcaatccccttctcccacctccaccccaggtttgccaagctgctgctacgtcttcctgccctccggtccattggccttaagtgtctagagcatctgtttttcttcaagctcattggtgacacccccatcgacaccttcctcatggagatgcttgaggctccccatcaactggcctgagctcagacccagacgtggtgcttctcacactggaggagcacacatccaagagggactccaagccctggggcagggtggggggccatgttcccagaaccttgatggggtgagaagtacagggcagaaccaagaacataaaccctccaagggatctgcttgatatcccaagttggaagggaccccagatacctgtgaggactggttgtctctcttcggtggccttgagtctctgaatttgtcgggttctcccatgatttggggtgatttctcaccctctgtccttcccccagcacaaagcactggccttgcctccaggaccttgcttccttctcatcttgcctcattttgcttcccatctgaagagtggaaatggggaactcccccagaggtggatactggggggcaggcctcccaagctgatggacatgagagtagggccctgacaggccttcctcctctcaaacctggcagatgggggcctctctggaagagggaggggccctgtcactgtccagagtctctttttacacttcacctccttctgcagtcagactgaaatataaaaaaggtggtggtggtggtgaaggggctggtggagatgtaggaaccgatctgctatttttaatttcctgtgaggatagagacttgcagttagactcaaagaagtactgtactttcccaggttgactaagaaatgccagtggtggaggtgggtgtttgggaaaggcagggccctgaaatggcctgtccctagggctctccaagcactagccttcccagcttcccgccgccccccctatctcttcctgtctaacttggggaaggggcctgggctgtgaggacagggcccccacaggggatggtttcacgagtgtagtcccggaggccttccctttacagctctcctccagccctgggcacatagcataggctggggacacaggatcctggcctgagaattgaggggaggtggccagcccgcagaggtggggtgctggggctgcatgatttttgccctgcgtcccttctctttggggctcctttcccctctcatacataaaatcgctttcaaattaaaatcgctgttttctggactgaggtgactgtatgaggatgggcagcgccgtttcgggcttggggggggtatccggttgggagctccggacgcgatccctggacgccgccgccgaggttccgtggggcccaagaggtgcacgcagggtgggggacacaaggcaagctttgtcggggagggggggagagggtgtgccaggctgggggcggggccggccggaggaggaagggggggcggtggattctcaaaggcgccttgttcgctcgtgccctctccgcgccagcgggcggcggcgcctcggctcgctgcggccttccctccgggcgcgctgcgggctccgggcagacccggcgccgtgcccgctcgtgggggcgcactgggcgccgagcgctgcgtgcttctcaggcgttgcccgcccggaggcggcccacgtccccgagtgaccccatttccctggacccttccaaccagagtcgactgctcgctcatcttaccactgctccccctctacctcggctctgggactccctaaccgcgtcccccatttgcatctccttggacctgactatcctgtgtttgtcggtgggtcccagtctctggcctcttgctctccgtagaacaccttcccccacatcccccgccccagttcgtcgctatctatagccttgtctataaatacccccgccccggcccggctctgtaattacacggggcggggtgagggaagtaattatggagacctgattatgggtggggtggggactgcgacccccaggcccgcctctccccctcccactgtgccctaaatcccgcccaggcctctgctgaaagggggctctgggcccccaagagggagggaatgggagggagtgtgtgtgactggacgtttgggtcctagaaaaggaaggggctagggaagatattggggttcccgaaaagagaatcttagggtacaggccgttgagacctacaaggggcaggagagagcgagcgatagagggagggttcccgcctccctccccaggtggagactgagggtggggtttcccttcggtggctgtgggcgggcggctggaggcgggggccgggccgggggcgggggcgaggtgggggctctgggcgccagggtggccggggacacacagaagcggcagccaccgaggagggagcagtgccgggagccccgacggcgccttgctgcatggagctgggccgctgacagctgtcgctgcccgcagcctctgacctccctgggaccccggcgtctgaggctcatagtctgctccctgtcttctgtcagcctcagggcatccagcgtctcaggccgacctgggtccctgggacccggcgtttcggcttctcagccatggagcggtgcagccgctgccatcgcctcctcctcctcctacctctggtgctggggctgagcgcggccccaggctgggcaggtaagaggagtcctgatgcctgggtcctcggagtcaggctggagctctgagtgtctctgggaaggggccagctgatgcctggggcagcagcttctgagtctaacaaggagatttggggcttcaaggctacaggctggagggcaggacacctgtgttccttggcatcagggtaggaatctctttgtccttgaagtgactgggggagggcagatagggctgaaaggtggaggaccactttagagaccctgaatggggatggatgcttgtcttgagtccttgggaagagctgaagatggccagggccagcccggtccagtcattgctggtgtggggatggtagacgccaatgttgatgggtgaggcgtgtgtgtcttatggcctttctgtcgatatctctgggataaggggtgagcacctgtgattcagagcagagcccagtaagcccagaaagaaaggaagccttgactacctgtctcattggcctcctggacagggtccccctccccctccctgtgccctcgatgctgccacgcagctggctctggggagcactggggctggctgccaacaggacggccctccggacaggccaggatcaggtgtctgaggccagagccaactctttgcattcctgcctagcccctcctccctctggccagccaggctcccctgggaccctggtgcccacaaccctgatcttttccttctttttcccaggacccagaattcctggcttctaggaaaggggatttgatgtcaaggagggggctgtgagcaccaggtcctcagcaggctggaaaaagcccatttctggagacactgagggctgatttatatttaacttgactattcaattcttctctgctttagagagaaaatggtcagaatggcagcacaaaagatttagattagattacagaaggaagaacttccaagatgtgaggacagtgaagcccagggccaggaaattgaggcgtatggtgcctgtagactctaggagtctttcttagggggaagagggatcctctggcatggaggcagggggatggctaagatgactgtttcttatttcaggggctgagtgggtagagatgggactttagggaaatgagttactgtagaattcctaaggttagagaataaggcatttggggggccagaggtagagtggtggagggtaatggggctaccagtggagagcctgtggggcagatgaggctggatacaggggggcaagtatgtggcctggtgtgggaagatggtgggcggacctgtgggtaggttgtccatatgatcgaattgtactcccttgggatttggtggagggtggggacctccgaggtctccttggcctggggtctctgtgagtctctgtgtctctgtctcactcacccttcgtctctcaaagcggcccttgtgtgttggtgtttgcggagctgccacacgcgcaggggccaggcttaggtgggggttgggggggaaggccgtggtttcccggctcctggactcaaagggccttttctctgcctgcccgccccacctcacccaccccacccagctccactctcctgattgctctggcctctgccctgccccacacttctatgaaagttttgctggaactctctttgggatttttccaatctggagctgatggtgtgaagagtatgtgtataggggagcaagtgagggcaaggtgatcttttgttttccagggagtttgagccctaggaagctgagttctagttagacagggctggtgggctggatcttgaatctttgggtcccaggtggtggggttggtgggggtggtgagacaggattgaggttccaggtgtggggagcttgcctgggttctgggcaagcactctgatgggatccacagatgtgtggctcagggccctggacctgttccggctcctcgtggcagcttcagcccctgccccccattcctccacccctccccaactcatctcctaaaccaggaggcacagactcctgggagagctttcttgtatctttttcctcagcatgctcagggttgttcccaccccatcccccaaacctgggatctgtagctgcttgaagcccctctcatagagctgcttctctgatctcttcctcgtggcccccctgcacctcctgtgtccaggatgatcgattgcccagatgttgtttgtgctggagacgggacagatgccagagacccagagagtgagagatatggaaagagagtgagagcgagggagagaaaaagatggacagaatgtgagagaaatggaggaagacagaagagacagagacagaaagaccaacataaagagacagagagagtaagagagtgagagagacaggagacagatgaagagttgagagaagtattcagagagtacagagagagacagattcataagctaaaagacaaagagagagcgtaagagaggcagatgctaggagagacaggggcaggagtgtcatggggttgaatgccagctgatgctgccctgcctccaggtacctttgcatttcccatccattcaggtactgttcagaagcaagtgagggtgaggtgacctttcccttgcagggagtttgagccctggaaagctgagttctagatcccaaatgtcccctatttatgccctcctgagggcatgtcccttctcctgataatcatggactctcccaggtgcaccccctgtggatgtgctccgggccctgaggttcccctccctccctgatggtgtccggagagcgaaaggcatctgtccagctgatgtggcctaccgagtggcacgacctgcccagctcagtgcacccactcgccagcttttcccaggtatgggtgacatggtggggtaggcctggggggaggtaatgggatggggcctaggatcagacaccaggaggaaaggggttgtggcggctccctttgcctctcactctgtgtgtatctctctcggttactaggaggatttcccaaagatttctctctgctgactgttgtccggacccgccctggtctccaagctcccctcctgactctctacagtgcccagggtgtccgacagctgggcctggagctgggccgacctgtccgcttcctgtatgaagaccagactgggcggcctcaacctccctctcagccagtcttccgaggcctcagcctagcagatggcaagtaagtttgtttgctcctctggtctgcctggcccacactttcaggaggaagtgcccccaaacccctacactctaaactgtgaaacccttgagaccctttgggccacaccacacctacccactgcccaaacttcagtcacttctagtccagagtttgggctttagagtgtacagccttctctgcatgttgaactagcctgtaccttgggcaagttacttaaaatttttgagcctcagtttctacatctgtaaaatagacattaaatagaattggcacaaataagaaagtgacggcatggtgtctggtgcactgtaaacactcaataaatggtagccattgttattactgctcttatcaccattggcttcaactcttatcactgctctccaaccatgttgactcccctacttcagtcagccaagagttcacttgaacctcttccaccatttccaggtggcaccgtgtggctgtggctgtgaagggccagtctgtcaccctcattgttgactgcaagaagcgagtcacccggcctctcccccgaagtgctcgtccagtattggacacccatggagtgatcatctttggtgcccgtattctggatgaagaagtctttgaggtaaccagagcaatcagaggcaggattgacttctggtcccctatcttgtgcccactacccttctggccccagcatgtcatcttcctattccctaggccttcatttttttttcttatgaattttcatttctattttctatcttcagggctactgttctctgcaggagaactagatgcctacctatatggcaggactgtccacagccacttactctgtccttcagtcttcatcagttccctcatccatccatcctttcaacccctctctctcctcacccacccatcaattcactcactcctcagccaacctatgcacacatccaccacccactcccccatctatttactcatctatgcatcacacgcccacctagtcatgcatgaaggcttatatccacccacctgtcaatcctccccctgcttaaccactctccccttcaaaccacccatctatgcttccacccatctatcctcttcaactcctccatccagctattcactcacccacccaccctccccatctacccatgcacacaaggatgcatgcatccattcagccaccatctatccattatccttccaccaactcaaccactccctccttcaatatactcactcacccatctcctgacccacttacttcccatccgaccagtcattcacccacataagttcacccatctacctattcacccatttgcttccatctactctgtaacccctgttcatctgcccaccagtccaccctcccatacgtacatttattcattcactatttatcaatgctcccattcattaatgcatgtaagcccccagccacccatccactcatctatccattcatccatccctccattcacccatccctccattcaccctccaagccagtcaacattttctgaatacctgctggacaaggagaacaaagaagagaatataaagtctctatcacccccaagagctcccaggtgggctctggaaatgagacaacatccctaaattacggtgcaatggagagtatgctaagcaccatgtgtgggcaaaagtaaatgccattggaactcaggaatgggttctccccactccatttctagaggtccagagaattctcatcatcactgccattggaaggccaaggcatctaaagctgagccctgtctctggaagccactgtggaagggctcatgcattgccacaaagcgcagaggggaggcaaagaattctggaaggcctgggatctggtcctgattctgccactctgggtgaccttggggcagtcattgcctttttgggcttttctgaatggaacgtatctgaaaaatgggtagaaagaaagatccttgttctgccaactttcctggttgttatgaaggtcctatgagatcccttgaaaactgaaaagggctatgcatatggaggactgacagtgaccttctcccatcttagggttttacctaggattggcctcctatactctttctcccggatgataccctctgcctctctctgaatctctccgctccatctctctcatgtctttgcagggtgatgtccaggagctggccattgtcccaggggtccaggcagcctatgaatcatgtgaacagaaggagctggaatgcgaggggggccagagggaaagaccccaaaaccaacagcctcacagagcccagagatctccacagcagcaaccatcaagacttcacaggccacaaaatcaggaaccccagagccaggtgagggagctgggagaacccccaagtgcagcacaccccagagagggaagacacccaggcatctctcctccttagttgtcctccccaccctcatctccctattcccatcaccccctcctcctagtcctcattcatcagcctttttattttcatctaaaaataaaaagagttgttatgaagaatttgtggctgggagctgtgttccctgctctgcgtctcctcttccagtcttcctggaactgtgtccctgggttttcccttccttctttgaattaagagattgggagacagtgggagaggggtgagagctggggaggcaggtaggagaggggactgaagccaggagaaagcagtcgggatggtgagaccaaggaggaggaatgggaaggagtagggatggagggaatatcaaaggaggggtgggtctgcagaagtgtgggagtggggaacccagtctctggcccccacctacctggaggggcaggaaaaggggaggtagtagggggaagggaagggaagggaagggaagggagcctgggttggatggggtctggagagttagaatacagataggctctggggtcagtggtctaaagatcagagggtcaatctcttaatcatgtctgcttctgccccacatgtggaaccccttccctctgttccacctctccccacctccctcctgaccctcaacctctcctttcatcttcaactctctgtttcccaactccacacctcccccgtttcccaactcccacaccatctttatatctccctctcccgcccttcaccccacaccttccaattaccccatccccttcctgtctatgcccaccccccaatcccagcccactgagtctctctactatgactacgagcccccctattatgatgtgatgactacggggacaacccctgattatcaggtaaactcaagggaccccttcatttcttccctttctcccagcacccccagcaatcatctcctaggacaccttcctcccctcccccatgccgtggggagaggcacagtgtgtttagattatggggatttacttagttcctgccccctccctgtctctctgctgcagcgccctgggagcccccaccacaggcctcccccttcccctagggggcatcggacccctccctgaaagcctaccccacctgccaagaggtcaatgacctggcaggcgtccccctcaccaggccggaggccctctccaactgcaggctttgacccagcatgggagcagcctcccctttcccgatgcccagctcggagggcagcttcccccactgcctggccccgccccaggaccagaggcagcagttaccggcaggtagagccggggcatccagatctctgcccccaaacctctatgaccttggaggttcactctccccaaactatccccctccaaaggggctgcaagatctgagatttcccccatcccccagcacagacagaccctgccctcgggggacaggtgctgctttgcctcccttctgctaacctttctccttccttcccaccccgtgctactcttctccttctctccttggggtcaggaccccaccccaggtgaagaggaagaaatcctggagtcgagcctcttgccaccccttgaggaggtaactctatgccccaccctcaccccatctgggggcagtgggcacctgtgactcactcccctcagcccatgacgtcttgatggaccagcccctcctctggccggagggttcttcctcatttccatcgatggcctctgtctttgggtcactctagaactatgggcctgcttgactctctaagtccagcccgttcccttcagtatccaggcctccttccatgattctttgattcctgagtgacttcgtctccatgttggtgtctaatggtcttactttctatgtcctatttctgttcccgggagccactttctgtccagtgttgtcaccttttgtcttccctatctctttggtcattcctggactcctttgtctgtcattgtgtccatggactgtccactctgcatccagtcctctggccacccttcattttatccaccacttcttcccactggacccactttctggacatctctccccatttttggcctttgatggcccttccatttatatacaaccactcccatggctattcttgggagaaaaaatccagttctgattaaccttggaatcctttgggctagaagttgtcacaccctggggtccagggtaagcctcctctcagccctaacatccccatctacccctctccctccccatccctgggaaggagcagacagatctccaggtcccccccacagccgacaggttccaggcagaggaatatggggagggtggcacagacccccctgaagggccctacgattacacctatggctatggggatgattatcgtgaggagacagagcttggccctgccctctctgcggagacagcccactcaggagccgtaagtgaaaggagcttctctttcattcttgactaccagtgggagctacaagaattgcttcttgttggtttcgatccttggctgttggctgtgagctatttcccatctgtgacttgtcattttctgttcacatatgatgtatatgttgcttgaaaagattactacctgccttcctttgccaaatgtcttaccttgtgactcttgtggatacttctgaagctcagggcaattgggaattaaaaaaaaaaaatatgtagccacttcctgtctttcttgatcacttcctgtctaactgaagctggatttcataaagcttttggtcaataaactactaccttgtgtccattttcagtgtttctctatcatttcttcttggtgaaataattttttgttcatgtttctaccaaacgatctaacttcctatgtcacctttttttaacctacaggccacttattatctgtcccttcctgccttctccagctgtggcatccatcttggtaactgtgtcaggttggactgcaaaggatttattatttctgttctggctctagtttttcatgctatcttgtgacaatttcctttgacaataagccacttcctgtatgtctcaggtcatttaaatcataaagtttccattgtgggcctcgatatttctcatggctacttcctgtgtgtcctagccttgatgtttgtgttttctggaagaattacccttcactgtcatgattccctttgcaggagtcacattctacctgttttgtgcctttcttttctctctgggtcacggtagccatgttgttgttgaaggttcacttcctggatcctctttccttcactgcttcctgtctgttcagccacttcctgtttgtccagtttgttttctagccatgttggccatgtttaattttcttcggccctggcatcattcttgcttccaagtgtttgtcattttgttctgtgtcccttagttgttctcatatcttccagtattccctgtcagtgggactgcttcctgtctactccgctccgtcttctgcctgccttgcagttctggctgcctcctctaccctgctgccgcatcccatacctcccctctcttgcctcccttgagcttctactgcctttcctttatgctgctctctgggtatttggggttgatatgggatttcagagaattttgaaacggatcattgctgtttggtcagaatgaaggtggagaggggcattctgaagatctttgttggggggagttggggtggtggtgaatgtctcccattctccatgttcttattttgtttctggccctagagttgggaacaggtatctgagtggaggtgtgcaagggagggaactggtgggcttggaatgtacttgagggccagaggaagggcaatgcattcagtggggactgctctccaattttttttttttttgaggcagggtctcactctgtcacccaggttggagtgcagtggcaggatcttggcttactgcaacctctgcctcctgggttcaagcgatcctcctgcctcagcctcccgagtagctggggttacaggcatgtgccactgcgcccggctattttttgtatttttagtagagacggggtttcacatgttggccaggctggtctcaaactactgacctcaaataagctgcctgtttcggccccacaaagtgctgggattacaggcgtgcgccaccgtgcctggcctccaaatttacttagagtatggatgcttaacctttggggcatatttaaacttgtgaaccctttgaaatcctaaataaaattctgtgcataatagcatatactttttcatttctggagaaagactcacagctttcatcagattcttttttttctttgagatggagttttgctcttgttgcctaggctggagtacgatggcataatcttggttcacttcaacctccacctcctgggttcaagctattctcctgcttcagcctcccaagtagctgggattacaggcatgtgccaccacacccagctaattttgtatttttattagagacggggttgcaccatgttggtcaggctggtctcaaactcctgacctcaggtgatctgcctgcctccgcctcccaaagtgctgggattatgggcgtaagccacctcgcccggcctagcttttatcaggttctcatgtgggtccatgccctcctcttaccccaaataaaaatctacccacaatcttagagagattcttttatgatgtattggggtaaatgtgtggaaggtttcttaaggttctagggagggagtttgggagatgggatagggtcctctagaagagggtttgggaaggtgggtggtttaaaatccctgaaaggggccaggtgtggtggctcacgcctgtaattccagcactttaggaggccaaggcaggcggatcacctgaggtcaggactttgagaccagcctggccaacacggtgaaaccccatctctaataaaaatacaaaaattagccgggcatggtggtgcacatctgtaatcccagtgtaatcccagctacttgggaggctgaggcaggagaatcacttgaacctggaaggcagaggttgtagtgagccgagatcgcgccactatacttcagcctgggtgacagagcaagacttcgtctcaaaaaaaaagaaaaacaaacaaacaaacaaaaacactggaagtttctggggaccttcctgaaagaggctctcagggagatggagaggttgtgtttgctgaggtggggctgggaactgggggggcagggaaccctgaggtctccttggcaggcttgaaaggtttgtgaagagggagttttaggggagggctgtggggctttcgggtagggctgaagtggtctcgagaggatctaagaatcaaggttggagttgagatggagaaaggcctagtgtcctggctgctcacgggccccactgggggctacatgtgtgtctccttcaggctgcccatggaccccgagggctgaagggagagaaaggagagcctgcagtgttggaacctgtaagttatgctggtcacagggctgaggcagtggaaataggagaagcaagtggggttgagtgtgctggtcctgtcgcctctgatttttaacctttgactccacagggtatgctcgtggaggggccccctggcccagaaggccctgcggtaagtctagcagtgacctggtggccattcttttcttagaaaccccttctatgtgctcatctgagccttccccacatatgcccaggcctcctcctcagaactcgggagcatccctccaatcaacgcttcccagattcccagatctgttctgcacagaccactcctcagccacaggctgagtgtccacacctgtctgaatgcccacacctgacccctactcttttgttcctcagggattgattggtccccctggcatccaggggaacccaggcccagttggagaccctggagagagggtaagggggtgtcctccatgtgacgggggagcttcgggggagctagtggtatccaagcggggggctaccatgcccagtaatttcctgttaggtggcttgttaatgaatgaggggatggttgtgcttcccagcaaccagaaaggagggcagactctggttggggagggtgctgatctggtttctcaccctcaattttccccatgggggtgggagactcaggaaagagctagagcaatctacacttattctgttgaagaggatatttcaaaatcatgctaagatcttgatgtccccttatctttcaccccatcttttgcattctcttcccactccagggcccccctggccgagcagggctccctggatcagatggggctcctggtcctcctggcacatctctcatgctcccagtgagttgtctcttgggttttggaacatgctgatggggaagacaaggaattgtgtcatgttaccaagaaccagatgggcaggaaagatatggaggagtctctaaagatcatcaaagatcatcactccaaagggattcgtctttggggttggggagatggggcctcattaggtgacctagaacaaaacaccagtcttctaggactgggcagaacagcctatatttcaggagctctagaaccaaaagagagtctttctggaggcagaggctggacagtggaggagggcaggagttgagtttctggaatcctctaagtgattatctggaagccatgggaaatgctggatgggcagaacctggggcaaggggcagaaacgctggagaaagcctctggctgggagggtcccatggctttcttggaagagaacctggaccttctctccttgccctcagttccggtttggcagtggtgggggtgacaagggccctgtggtggcggcccaggaggctcaggcccaggcgatcctgcagcaggcgagggtgagtggggctgcttccctggaaagggaaggctctggggggcactggaagggttggctggagtgagtgtgcggcaggggaggcctgggttggtttggggttaacagggaggttggggagaatcctgggcagtggatgaggatcaggagaggaagggtgaatttggagagtgctggggctgggggttcccactgcctgtccctcagctctgctgtccccctgctcccctagctggcgctccgtggaccccctggccccatgggatacacagggcgccctggacccttggtgagtgagcagggtgctcgggtggaggatgctttaattgtgtgtggggtgtggatagttctggaaaggggcttcttttggggaacactccgaggccactgttggctgtgtccttccttacggccatcctctcttctctctcccagggccaacctgggagccctggcctgaaaggagagtctggagacttaggacctcaggtgaccactttcctccactgcacccccatatctgttcaccagctcagtctccctcactcccctccctatgcctcctaaccccaccccatctctcctctcaccagggccccagaggacctcagggcctcacaggccctcctggcaaggctgggcgaagggtgagtgccccaggggtggatgggtgttgtggggagacagggcctgcagggtaggggactgcggccctgcttgttctgacacttcccttgttctcccagggccgggcaggtgctgatggagcccgagggatgcctggagatcctggagtgaaggtaacaggcttgggcccctccctgaagcctgtagccttcagcccacgctgggctcagttgtttcttggggatgacctagttctccaggcttccccaggatcagcacccccccagctcagggtgcagtagggaggggtgggcttggacagggtcgtgtcctcactctggctatccttcctcctcctagggtgaccgaggttttgatggactcccagggctccctggagagaagggccatagggtgagtacattagtgggtgtgtgttgtaattggggatagatcttctatgggagtgaggataggtagggaagggaggctggaggcttggcaggagctcagtgaaagtaatggatgggctaagtgcagaggttcggtgtctgcctgtgttgggggctctgaagcccctcttatgagttcccccattttgcagggtgatactggtgcccagggccttcctggtccccctggtgaggatggagagagggtaagtgtagtggcaaatgtaggggctgggtgcaggggaggtctagaaggcacagcagctttaccgtgtcctcctcctccagggagatgacggggagattgggcctcgagggctgcctggagagtcggtgagtgtccaagggctggtgctgggggagggggctctggggaagccaggagggggacatgagcactaaagggacacagttttatccattcatgccgtctcctcccctcaccgtgaatgcagggacctcgaggtctccttggccccaaaggcccacctggtattcctggaccccctgtaagtgactccctgacttctgaccctgaggtgaccccttgacctctccaactctccacctttctagctgccttcctgctccctctcctctctcggcatgcttcccattccctgtgagctccccctgctctggccccacactgccctgcctcagcattcgctccccgtgcacagggagggccatgtggcgtggtgccctgagggctctgggcataggaaataaatcttcaagaaaaacaaaaccaaagcccacaagcccacagatccacagtcccacacactgcaggcctgggccagctgtgtttgcttgggtttgggatggattggaggtctgaccgtcacaccctcgggaatggccgggcctctgaaaaccacaggtccctccgggccaccttcaggctgctcacacccatcttgtgtttcagggcgtccgaggcatggatggtccccagggccccaaagggagcttggtgagtgatggataggagatcccacccccattcttatcccccgaggtccctgccagcatcctgttggccgccattttgacccctgcctgcttcctgctcttgccttcttggctatcgctgctgggactcagctccatgctctaaatgtgttctatctccatctccttctgacctgtgcctggtcacctgtttctagggaccccagggagagccaggacctcctggacaacagggcacccctgggacccaggtgagcggtgcccctactccgttccccaattttcatgacttcccttgggcttccacaatgggtgagaccctggaaggatacaggaaattaagggtttcaggcccttgttgctcatgctttgaatccgggaggctggatagaagagaccctgggaggcccctgtgacttctctttccctgtatgtagggtcttcccgggccccagggtgccatcggccctcatggagagaaggtaagtgactaagtgatttggaggacagggggtttagagtggggatgtagggagaaccctaaatgtctgctgggattttgtctgtgtccagacatgacccctctagtgaccctgagcctctttgtcttcctgcagggtcctcaagggaagccagggctccccggcatgcctggctcagacggacccccggtgagtgggaccccacttccgaatccagttccccttggccttccaccccagtgcatgacctcagagctcctttagtgacccttgcactgaaaggtcactggtggtgcttgtccatggacagttggcttcactaggtcacaggaaatttgggttggaagaagtgtagggaggggtgcagagagggtgacaggggccactggtcacattttctatcccttactcccagggtcacccagggaaggaaggtccccctggaaccaaaggaaaccaggtgagatcttccatgtctttatcccctgagggagtctccactcagactctagagcctcaaagtccttgggattcccttgtctcattattcatatggctctgccacattctcaattcctgtgccccgtaaccctacccagacagcaatgttgttacttccatttcttccacccctggaggcccccacagtgacactctgaggcccctttataaatgcctctcttttatcttccagggtccctctggacctcagggacctctaggatacccaggacctcgaggggtcaaggtaactgaccaccaggctgggagacaaagggctgtggtcaggggagctatatggggtcttaggagcttggtccttccaacccacctccatcccctgatcagtctacttctatcccctctctaattctagggtgtggacggaattcggggtctgaagggtcataagggtgagaaggtgagcaccatgcccccagcttcccagcacctcagtcctgccatctcctctcttcactgccttccctccagcctgccccgcactgccgtccagctcccgagcccctgcttccacctatgttctcagaattcccattagaaccccagccctctgtcatctgtggtgccctctcacctctatctttctcagggtgaggatggctttcctgggttcaaaggtgacataggcgtgaaaggtgacagggtgagtagagaccccacactggccccaattccgtgttctactgagcctccactctggagacgccaagcaccggtttattctcctgagtctccagactccacagttccagtgctgtgttcccttgggagcctgacccctacaggatgatagccccatggtctgtgtcatgcctgccctcccatcactacactatccctaccctgtgggcttcctgtcctgcagtggctcctgggacccctctagccctcctcagcctcactgttgcccatttctcctctgggcccagagcccacctccagtccccagcactcacctgtccttccctctcacacagggcgaagttggagtccctggttccaggggagaggatggtcctgaggggccaaagggacgcactggaccgactggagaccctgggcccccagggctcatgggcgagaaggtgatgggatgagggttctgtgcctgggtcctctgggggtgtgggcactggggtcaggatgggcatgggtgcccgccgctgaagtcagccagtcagttgaagatggccatgcattagtcatacttctgtctgtgtaaatggcatctctcagctgctgatgggcagaggggatatataagaagtcagggaaaagtccctgacacgaagagttggacggagacgaagcttagagagtagctgttgcttcaaggcagagtgaacatgcgttcggactccaagcagcaggagttctgagatgagagagtctaatagcagtgaggtctgtggtctccagagctgactctccccagcacttgccctgtgccaggtgctgtgctgatgcgtcctatctatcctatgaggtaggcatgtgacgtactgttttgctgaggttttacagaggcacagggatgcttgttgattacatggccagtgaagggcagagccaggggttatgcccaggcagtctggcttcagaatctctgcttctaagccctgctctgcagctgcctgggcaggatgagccctggagcctctggggaagggggcatgcacgggagtcggggtgtggtgggcaaagggcctgcagggggattggtcttggtgaagcaggagtgggtgctggggtagatcccacctccctcatggggtagatggagctgaggttgacatgtgggaagcagctagatcacagtgaccctgaaggacctgatacctctgtaggcgcaggggaggtgggatcccagcactagaattggggaaaatccactcacgggaaggagagacaacaaaagtcaggcagctgtggggcaagcaatgaggggctagaggctggggtgtgtggggtgtgttgctgggtgggggctggctgttatatgtgagggttgaggtctccaggggtggagtggcatctgggcctcctctcactcctaactgcttcctgtccctccacagggcaagctgggtgttcctggtctgcctggctatcctggacgtcagggacccaaggtgatgccatgccccatacgtgcccctcctcctcttccctcctcctcttcgcttccctgatccctgattccagaaagcacagatgcagggcagtgggggaccccagagggaatttagctgacccccattttacagatgaccgaaagaggcccagagagcagcaggggtttgtccaaggccacttagttcttggcagagctcgggtctccctggccactgcctttgtggcctctcctgaccccctttgccccttcctgaaccctacctttcataacttctcaatttccccccttctccgttctcaccaggggtccctaggatttcctggctttcctggtgccagtggagagaagggagcccgggtaagctggggggtgggagggcgtgagaagggaagggctggagaggtgtagagggggtctgtggggagtctcaccctgggtaatgttctctctgcttcattcccaccagggcctgtcggggaagtcagggcctcggggagaacggggccccacggtgagtgcaggggagagaaacaggtggctcaaggtccagaggggggcatttgggtttctctgacaactcctcttccctctgtagggtccacggggtcagcggggaccccgaggtgccactgggaagtctggagctaaggtgaatggtctctacaaggctccaactgccccctgcccactcagccccagctctccctcaacatcctgacctcggggacagctggaaagcagctcttcccactccttgactctgtttccccccacagggaacatctggtggtgatggcccccatgggccccctggagagagggtgagtgtggatcgaaagtccccttcccctgaggtccccagggagcctgggtgagccagctccctcctcaccccaggaaggaagctgagttcccccactcagcccctgcccccattctcctgactccccccacctctgtctctagggcctccctggacctcagggtcccaacgggtttcctggaccgaaaggacccccggtaagttgaccccgagctctgacccacctcgcttctctgagtccttcttccctacctgctttccagctgagagttcacctgacaactgaaccccttccagggcccccctgggaaggatgggctgccgggacacccaggccaaagaggagaagtggtgagtgatgctcctggctacccattctcagggggctccatcagaccctttaaccccagagctgtctggaaagcccacagggacgttctcctggcagagtggagcctgccctggtgctgctcagacccagggcccagggcttggtgtgatcctgcctgggatccttcctcctgggaatctgccccacagcgcccacacctgctttcactgcattctcctctcttcctcgcctagggtttccaagggaagaccggcccccctggtcctccaggagtggtgggacctcaggtaggtttgtccctaggagagaatggacccctgaccctagcattagtctgtctgcccctcttctctcggtcacacgcccctgccccggtccacctgacccagactcctggggctggggtcaatggtgggggctgggatttcaggcaggggtcctgaacttcagtctgttttggggcgcattctcatcgtcttgtcccccaggagaggcagttccccaacagagacacaaggtggtgtagttactccacatggggcaggagaaaacccagcagtggcccaggaatgccggggaatttcccaggagctttggggcagggataaaggggttctgaaggagtgttttagggtggccagggtgggctcttctggcagacagcgagatgaagggcctgagagcaggaactctctctgcttttgtctagggagcagcaggagaaaccggccctatgggggagagaggtcacccaggccccccggggccccctggagagcagggactacctgggacagctggaaaagaaggaacaaaggtcagtgaggggccaggcagaggggaagtgggggagctggggattggggtgctgaaaggaacaggtagttggagatttgagggggggctggagagctctctgtttaatttgggagcatggctgtggctcatcacctctcctttccttttagggtgaccctggtccccctggggccccagggaaggatggtcctgctggtctgaggggattcccaggagagagaggcctcccaggcactgctgtgagtgtgactcccagacccctgcctgtcacaagcaccaagcatcctgagtccccaccccgaccctgtccctgaccccctccatgtcactccccacttccatcttttggagcctgtcttccctctccagctctcacccttctcttttcgtgaagtctcatcttccccaaatgtctggttcatagggtggacctggtttgaaggggaatgaaggtccgtctggcccccctggccctgcagtgagtctggggttccggaagtggtaggaaggacccgggaaaggggtgggtgaggaagggtgggagtggcattctgataccaccaggggctgtggggctgggcagaggctgtccagggacagccagaatgcatctgattttgggagcttttgggaattgtggtctgaggttctctggtatgggcgggctggtgtctccttcctgggggtctgaccatctgctttctcagggctcccctggggaacgaggtgcagcaggatcagggggacccattggtccgccagggcgcccaggcccgcagggtccccctggagcagcaggagagaaaggtgtcccagtgagtgtgggggtattggggaggggtactggggaggggtctgtgagcctagggttgatgggctatgacaagtttcctgtggggtgtttgagggtgagggtcacctccaggccatgactccttcctcctgtcccacagggtgagaagggccccattggcccgactggccgagatggagtgcagggtcctgtggggcttcctggtcctgctgggcctccaggtgtggctggagaggatggagacaaggtgaggggaccccacagaccccgaccaatcttctttccagatgagatggctgacctgggcatgacccctggcccctgtcatgtcatccttcccactctacccatcacctttctctaatatcttgtctgccttctcctcccagggtgaggtgggggaccccggacagaagggcaccaaagggaacaagggtgaacatgtaagtgtccatgaccttgacttctgacctcctggcctttaacctcagtcccacctgatctctctccctgttttggtgtctctgactctcttctcttacccagggccctcctggaccccctggacccattggtcctgtggggcagcctggagcagcggtgagtgacccctccacccccaccgaaggcccagcagcctctggtcctccctcagctcccctctgcccttgtggctgggagtgggagcaggggctctgggcctggcacccagctgtgtgtggtatttgtggatagagaacacctgacccatgacccatccctgtgtccttgtctctgctttccctcaaccctgcagggagcagatggggagcccggagctcggggaccccagggacactttggagccaaaggtgatgaaggaacaagaggattcaatgggcccccaggacccattggcctacaggtgtgttgggggataggacaggggctgagaggtggggtcaggatggggtgatgttttgccccagactctgccagcagcctgccgatgcagactggagggcctgcggagtctgaggggaggggactgtggggcctatctgcctagggctgtgctttgggtggggtcgtcacctgggcccatgttttgtatacttgcacagggtttgccaggcccctctggggagaagggagaaacaggagatgtgggtcctatggtgagtgtgacccctactgaccctagccaccatactagtcacccccctccctggccagcccccaccccacaccccactgccaactccctggcctggctgctcctcctcctctctccaccattcatgctcagccatctcacttcccttcctcatctgtggtgtatctgtttcccccagggaccacctggccccccaggacctcgaggtccagctggacccaatggcgctgatgtgagtcatctcagcccctgtcccttgagaccaatgtgtctggtcttctgcctccctttcccagaccataaactctagtatcgtctcaggggccaagagaagcccttactcccgggaggcctccactgcctcactgctgtaaccttgggctgctcatctgggactttgcccctgaaatggcacctccatcctaagcaatgacacctatttctgttcctcttccagggcccacaaggtcccccaggaggtgttgggaacctgggtccccctggagagaaggtaactgggaagggggtgagtggaccagtcatggaagtgggggatgggagttggatttctgccaattttgggtggggagacaaaagagaatgagatgtggggaatatcagaattttttggctggggaaggagaggaggtttttgactctaatctctttgcagggggaaccaggagagtcaggatctccagggatccagggcgagccaggtgtcaaggtgagtgacagctccaaggccttactccccagtccccgtcacccgcctcaaccctgcctccacttttcctgtgacctccttgagctggaactcctctgcagcaagagtctctgctccctgccatcctctatgaggcctgatccctggtctgagtgagcccttcttcccctttcttgaagggaaggggactagggaactccccttgtaggcttgactttctgtgtatgtcccattgtcactgaggggagtaggggatggctgaaggtgtctcggaagcagaggctgcatccctgatcttcaagattccctgggccatctgtgtcctccgcttgttctgcagggtccacgcggggaacgtggagagaaaggagagtcggggcagccaggagagccagggccaccagggcctaaaggccccacaggcgatgatggccccaaagggaaccctgtgagtttggggcagtgggggctgagtcctctcaggccctgtgaatgacagacctgggaatatgggtgtgtgtgagggaggatcttggagtgtggggagcccgggagtttgggggatgctctgggaatggggcatccagagggatgcctggggtctaggatccggagagaaagtgagagatgccctgcagttaataccttgaggaattagacaacacgcagtgcacgtggtagggaaaggggtgcaggagacctcttcctggggggtactggtgggcactgcctctagagaggcagtggcgtgtgcctgtgggcgtctgtgctgggtgggcttagggagctgtgaccctgactcttattctccatctggatcagggtcctgttggttttcctggtgaccctggcccccctggagaaggtggccctcgggtgagtcttactcagagaagggaaggggcaaaaagggtggggcttctatgggggggtcctctgtgtggccgctgggcttgggtattgggaagccgggggtatggcagggtgggcaaggggatggggtattgacagttttggaggtgatgccagccaggttgggggcccacctctgaccttgcttcacttctgcagggccaggatggtgctaagggtgaccgaggcgaggatggtgagccaggacagcctgtgagtgcctggtgaccccaccacccccctgagcccaagcctcatcctctttacccctcttctgtgccccactcctgaggggtcccttggctggaggataaacactcagccaccccaattcctctctccctagggatcccctggtcccaccggggagaatggacccccagggccacttggaaagcgagtaagtgaggtggacccctgagaccttgggaggcagtccctgggctgtgtgggtggaggctgggcaatggcaggtgggatgggtggggaggtgcctggtgtctgcattgccctgggtgtgtgtgtgtgcaggagctggtgggtttaagggcgtgtggtatctcattgcccggggcagggtgtgtgtgcaggagctggtgggtttaagggtatgcggtatctcattgcactgggcgagtgtgtgtgcaggagctggtgggttgatgggtgtgcggtatctcgggcatgtttgttcctgggttctggtgtgtatgttttcaccaggggtagtggtggttactgacaaagcagaatggaaactggaggaggggctggccagcttttctgtgggccaggggtgaacctttttagtttctggggcaggagacgggccaccaggtagggtgtgggcaagtggcccttcaccaaatgtacagactacccagtattttcacaactgtcacagctgtatctgttctgcacatctgtgaatcggccctcggcgcgtgtccctgtgtatgcacgtgtgtgtgtgcatgtgtatgtgtgtgtctaggacaggaagggggaagagttgagcctggctgcccacggcctcatgtgctcttccttcccactccacctgcagggtcctgctggctcgcctggttccgaggggcgacaaggagggaagggagccaaggtgagggacaggctgccctagtgctggagcatcccctccgcctcccacccctcagatgcctccgtctccagatgcccaccccatctccacctctcccatgttgggcccttatggggacaggcgttccctgtacttgttcctgcgctaggggctcctagagtttggcccttcctccctgcctcctgcctcccaccttggaccctctgccccctgcccacaccccactcctctgccattcaggacacattccttgtgtgtgtttcagggagatcctggcgctataggtgccccggggaagacaggcccggtgggtcctgcaggcccagcagggaaacctggccctgatggtctgagggggctcccaggctcagtggtgagtcactgcagggaagggctgggctggggtgggagtgaggggccatgggaggggtgcagtgtggggatgctcctcctgacccctgtggccccctcaaatcttcagggtcagcaaggccgacctggagctacaggccaggctgggcccccaggtcctgtggtgagtgactgggattgggctgagtgaggggtgagggcagtgccctgggacagagctgaagccctggaggaagtggaggctgttggggagaacttggtcccacctctcccttaagagaatgacttcccatctctccacagggacccccagggctgcctggtctccggggcgatgctggagccaagggagagaaggtgagtgacagacagacacgtggccaggtgtctctcccatcaccctcgcccctgaaacctgtgggacccaagtgcccactgctctgcttcaggcctccggcagccagtcccagggagtccctgctcagtgagggccactcacggaccctgtgcccggctccctctccatgtcctcttggcccttctcccccatccacatgactcctctttgcattctcttgactgcctgcacccttctctagggccacccaggtctcattggactgattgggcccccgggtgagcagggagagaagggagatcggggacttcctgggcctcagggctcccctgggcagaagggtgagatggtgagtagagggcatggtcccggaagttgtgggggttgagagtggggtggagaggggtggagttggagttgggactcagctgtgggtaagcgagcaggtgctcaggagggtgtgggaggaggacccagttgaaccagccactacccttcctagggtatcccaggagcatccggccccattggtcctggaggtccccccggcctccccgtgagtactgcctctgttcctccacaaaatcccctaaacccctctgctgcccacccacagcctcccaacgacttccatggaactaccagcctaacaagcatagtcctcagggtcccccatttgtcctgtcaccaccagtacctcctccccatacttccagggctctgaatgtcctagtattcccacaagactgcccctcctgtagtaacccgaggctcctgtggacttgggaccttgcctccccgctcctctgagtcctgtccttcccctgcagtgaccgtctctttcttgttcctcatttcacagggacctgctggccccaaaggagccaaaggagccacagtgagtgacccccttcagctctgacctttgctccaccccctctggacttgatgatgtctctccaggacaaatagactccccccaaggagccccttattccagccaggaggctgatttgatctttctgtgaccttgatccatgcttgacctcttgacccctccatgacctgatttattccttgtcagggcccaggcggacccaagggagagaagggtgtgcagggccctccaggacacccggtgagtgaggagtcagggctgctcccagggccgtacccctctgctccactgctgccacacttcaccctcacaccaaccttgtctcttgccctctccatctgtccctgcacccagggtcccccaggcgaggtgatccagccactgcccattcagatgcccaagaagactcggcgctcggtggatggaagccgtctgatgcaggaagatgaggccataccgaccgggggagcccccggcagtcctggggggctggaggagatctttggctcactcgactccctgcgggaggagatcgagcagatgaggcggccaacagggacccaggacagccctgctcgcacctgccaggacctgaagctgtgccacccagagcttcccgatggtcagtgctagcctcagggtgcacaaacatctccccaacagcatgggtactgaacaagcagaatggatgctgggggagtcttggtgaaggtgttgggttaagggtgagggctgaggggctgggaactgcagctatttactaaccaggtcagaagtatcccaatactttagcaactgatctgggtcagtgtgtaccagttggttatcagcccagtgtctgcaggagcagataaacatacatacgtgcacacacctgtttgcacctgaacagatgaatctgtgtgagcgcctgcaaccacatgttgtcccagtatgaggctgtccatactcggacctcctccagtcagagggcctggggttactgttgggggcagaggtgtcacgtgatgaaagtgggctgcagcagtaggatgctgcagtagaatccagcagtagggctagattctagggctctgggagggaggaggaccaggagactaagagcatgatggggagggctgggagggaagagggaatgtgggggcaaagagcatcttggagcctggacctaggtggccctgacctcccctctccctcacccaacaggagagtactgggtcgaccccaaccagggctgtgctcgggatgccttccgagttttctgcaacttcacagcagggggtgagacctgtgtgacgcctagggatgacgtcacgcaggtgagagctggcccctcgctgcccctcccctgccccatagtgcaccccctcagggcttagtggtttctgggttttggtgacagtcccctggctgttgccccccccggagcctgccaccccttctccacttcttagctctttcttcttttccttttcaccggtcctctgatgctcactttgcctttcgtgtacccccagtctcctggctcccactcagcccctcacttctttcccagcccttgccttccagccattccctgctcatgactctggctcagctgtcctggtgccgtagatgctcctgaggcccgtctctgtctccctctgaggccagccctctctctccccctctgaggccagccctctctctccttccagttctcttacgtggactcagagggctccccagtgggtgtggtccagctcaccttcctgcggctgctcagcgtctcagcccaccaggacgtctcctacccctgctctggagcagcccgtgacggtcccctgagactccgtggggccaatgaggatgagctgagcccggagactagcccctatgtcaaagaattcagagatggctgccaggtgggaacaggaagagctgggttgggggctgatctcagactcaggctggaggaaggaggtgggaagaccccttgggcagggcacccagggggagcagggaggagtccgtcctgctggattgtcagggatgcctgagggagctcaaaagccggtgaggaaggtggaaaggatggaagccatcgggtgaggttcacttgggtacaaacaccagcgtcacacaggttaatgcagacgtgtacacagactggcacatggctgcccagcagaggcacacggtgggggagaagcaaacacacacgcatgggcacatagacactgccagtctgtacatcctgagtcaccctgatggggccaaggtgctcagaggagaggtgagcctgggcctgaggttagagggtggggggtgcctccatcctgctcacactttcttccttgtctccccctgaagacacagcaaggccggacggtgctggaggtgcgaacgcctgtgctggagcagctgccagtgctggatgcctccttctcagacctgggagccccaccgaggcggggaggggtgctgctggggcctgtctgcttcatgggataggaccgtctctgtctgatcctgtccattcggaaccaggcccacctggaatcccacaacatcagctctgtgccacctcccaagagggctcctcactatctagggagccctgggccagggcgtggagagccctcagtcggggcaggccaggggaggggtgaagtggttgcctggacaccccacgggaggagtggcatctggggctcttggccctcccacctggagcctgttacccgttagagagctgagacccttatttaaaactcacctcccaatcaccccaaacaaatggaagagaagagaaaggacatggcgtattttgtatttaaaagtaattgtattaattatttaaagtgtggaaagcaaaataacaaaaaagagaaacgccaacaaaaatcagcagatgttgaagacaggggtctcgggggtgggctccggcacccacatcctggagtcaggactttcctcagtgactgtgtgtaggggggtttcagggctgaaccccacctccctcccaccttcctcccacctcacctgtcgcacccactgtgaaagttggaatatgtggtctccctggcctcagggctctgactctgccagggtggggctctctaacccacaggtgttggctgcctggcccatgtgcccactgtctcttccacttggtctgggtttggcaggcactgcctgctacttgagggccaggatgctcccccagggaagaaacggaatagtgtggggtgtgtgcagggctgcatcccgcagatggctggaatattaaaattcttctatattggctggtaaattgccatggccctgagccactgagtatgttcattgccacccctgtccctcccctgggcacccctcactttccctgatcctgcaattaaagggttaatgtgtggcatatggaagggactcccaggaccctgtgcccagcttccatgctgactgatggttaaataatgtgattgtctcctcccaggtgtctgtgtcactgcttgtgttgttatttcagtctcccccgacacccatctgatgcttcctcttcccagctaagtggttaccagaattgtatggcttaatccagataccctgcaagccctgtccagctggggtgtcagggcccagagtttacaaagcctgggtgactagcataaaattacaaacaatgccccagggacaccaggtaggggtttggggtccctatggctccagtttctgacacgggtgtgcgattgcttctgggtgtgggtgggacggtgctacatagcccagtctaatctctgtaaatggggaggctgaggcccacttccaagacatttactgcatctgtacctctggtcaccttatccctccccatcagccttgtgctgtgctgtcatgaagacagggctgtggccaagccctccacactcacgtgtagtcacgtgcatactcgttgagtctttgtgttgggtggagtcgcacagtccctgcctgtgtccccccactcttgactgtcccccacttccctagcctccctctcctgggcactcagaagctctgctccctccgggttaggtgtccaagaagtcctctcttccaaggctggccgcgcagccgggaccccctagctggtgcccatggggcttcacattcccaagcagtattgcctggctcctgcctgtcagggcgctgcattaaaacgtgttccagggcctcatcccaatttcctcttcctcaaccctcttcctcgcgggcgccagaatcaagagtgcgtgcctttgtgtcccggtttcgcatccgcggcctcggggcgggcctggcagggctgcccttcaccccgagcccgagcccgggtaggctgcgcccccgcccctcctccccgtacttcttcctcccagcgtgtccccgacagcatcggcttggccgtcccggtcccaacccattctcgatcgcaggaagccccacgtgggcgtctagacggccactctggcccgggcgggtgcgcggaaaaacttctcgagggtggaagcctctcctcggcgctggcgcctccgcctctgccgccccctagtgcccgcgctgagaacgcggccccgcaccgggtcagctgaataatcccggtccctcagacgcctctcccttgtcacccgctgaaccccctgaccccgaaggccgaatggaggaagaagcccctgatctcatctgtcaggggtccggtggtggataggttttctgggatcacccatgctctccatctcaatatccaaggcccaggggcttcagacacccccttccctccctctcagggtcacattaagagaagatcagatctaaataggtgccccccatctgtttctcccgcacccactcccagcctagccgggctggagttgagatttctttggcgctctttctgcagctggagccaaacccgcagaggtcgccccccgaacagcaagaggactttcccaaaggtcacgtttggtcagatgctctgagttccgagggcttttctgcatggaaacaatgctgtacagtcactcgaataacatttatatacggcggctaagtccccaggccaatccacaaaagcctatttaattacacagtgctgccaaccaaccccatctaacagtttcacgagggagtctgtgccaagttgctgttgaggaggccaggcccacagccttctcttggcagctaacttcttcctcccctccagaaagctagagccaggctctaaggaagggtgggaggggtttaagggcagggctgtagaggcggggttttggggtggggctgggtgtgaacagggcaagtgcccaggcctctgggcctgtgggtagtggcagtgtctccattggctggtgggcaatggaggcttctgggtggggtgggaggagatagggaagagaaaggcagaggctttagggaactactttgggtttgattggggcagaacataaactcttgttggaggggccaaattctgaaaagtattgactgcttatggaaggagttgaacttgaacccaaaaactaagagtcatagatggtgtttgaaaaggcaagtgatatgatggaattgtgcgctggcatggtggcgaaggagaggagggtttgggatggggcgcacagggagatcatgtttttttttgttttttgagacagagtctcgctctgtcgcccaggctggagtacagtggcgccatctcggctcactgcagcccctgcctcccaggttcaagcaattctcctgcctcagcctcccggatagctgggactacaggtgtgcactgccacgcctggctaatttttgtatttttaatagagacggggtttcctcacgttggccagtatggtcttgatctcttgacctcatgatcctcccgcctcggtctcccaactgctggggttacaggcgtgagccaccgcgtgggagatcatgtatagagggagggctgtggggtgggtcctctggcctgtcacacccttggagctgcttttcagctttgggcttatatttttagcatctgtaacttatggttaaaaaataacttgtgaaataaaataaaaataacttacagaccacttatatcactgtacctgggagcaccacatatcctagaaggccatgggctacacagagctgttcttgccctcccttggctgtcttgcatgctgaggtttgtagttttgaatggaccagggcaggtgggggtggagatgagacagaggagggagtgagtcaaaacaaggctctcagcctgggcaacaaagcaaaactccttctctctctctctttctctctttctttgagacagggtctctgtcactcaggctggagtggagtggcaagatcaaggttcactgcagcctcgacctccgtgggttccagccatcctcccacctcagcctcccgagtagctgggtctccaggcatgtaccactagtttttgtattttttgtagagatgggattttgccctgtttcccaggctggtctagaactcctgggctcaagagatctgcccatctcggcctcccaaagtgctgagattacaggtatgagccatcacgcacggccctttttctctacaaaaaaataatttaaaaattagctgggcatggtggcatgtgcctgtagttgcagctactcaggagactcaggcaggaggttcacttgagcccaggagtttgaggttgcagtgagctatgctcttgccactgcactccagcctgggtgacagagagataccccatcacaaacagacaaacaaacaaacaaagggctccagctgcctcagaaataagtttctgtgtagtagctggtggccaccttgttttgtggttgtttagcccattttcctgcaagtgtggtgtggtcagcagggagcatcagggccacactggagcttctttctgtcgagctgtgcagttcacagactgtacatgtgtaggccatagctatgtttctcaactcaaacctagagtaagcagaagtcaccttaagtgcttataactggccttctgttatcttttctttcatcttcagagtagtttcatgggaactggcactgacagcagactgccatctcagtagggaagacctgtcctgctagtccttgaataaagaccaaggatatctacatgggcttctcctttagggctctccccacacggccaggatggtagaatgaacacagctctcagcttcagcgagagccagcatatcaccctgtctggctttccctcagttggcaggagcaggtcaatccattttgtgtacttcgctctggcctctctttttttgtttgttttttgtttttgagatagggtctcactccccttgcctaggctagcatgcagtggtgcaatcatggctcactataggcttgacttcttatgctcaggtgattcttccccctcagcctcctgagtagctgggactacaggcgagtgccaccatgcccagctaattttttgtatttttagtagagacgtggtttctccatgttgccgaggctggtctcaaactcctgggctcaagagatccccctgcctcagcctcctaaagtgctgggattatctggcctctcttttttttttttgagatggagtctcgctgtgtcgcccaggctggagtgcagtggcacaatctcggctcactgcaacctccgcctcccgggttcaagcgattctcctgcctcagattcctgagaagctgggactacaggtgcccgccaccacgcccggctatttttttttatttttagtagagacggggtttcaccgtgttagccaggatggtttcgatctcctgacctcgtgatccacccgcctcggcctcccaaagtgctgggattacaggcgtaagccaccgcgcctggcctatctggcctctctttctattaaaaacgccttactctaggttgaaggacttttggttcctgaggcatggatgatttcccaaagtacaacagataaaagccacactggctgtacagcagctcatgtaaaggtcatgttccaggtcttggccacttcacctataacaggcttggactccggcagagcctcaggccaaagaatgtgggtcatagagatatcttcctcattgtgttcacatctcccccgggcctgggctatattgttgggtcaggtaatcggcctgctctcctcatgaaataaggcatactggtattactaatgctgggagagatttcttataattccatcccttcccagttgtggttatttgtattaatacctgcaggttttccttacttttagaactgcaaatctatagaaacaaacaaaccccaaacccaacaaacatgtttcagagacattagggttagggagaagatgagaaatagcaccctgtttgattggggccctggggagagagggactcagacaaaagagtttgagtggcaggtggtctagttttgggtgggttgagcagacttagggccaaaggtggcactgattctagctggcagcgggcctctctgtatttccaactgagagttctccttcccttagcttgtcagggatgctttgcttctgagttgcacacttaacctcagcatcagtttcttcacctgcaaagtgggataatacttgctctgtaaaggaataattccccctttactgacagcctttgcaatggaaagtgaggggagggacctgacaagctgtcttggttccatctccatgtcttggttattgctgacacacgggtgtctggggcatgctgctgtcccttttccacttttgattttagtgctgttaaaactctatacttactattattattttcttgttacaaatcgcaaaatctgattcagaatagcttaagctccaaaaggaattgattgtaaaaatattgggtttctcaggatttgaagacagagttgactcaatagggaagactgagagcagttctgggaacctcaggggctcatggactttgtccctggagtgtggatactcaccgctcagcagagctgctcttgacctctgtgtctctgggccccatggttcaaagtcatggagagacaatctgattggcttagcttgggttatctctgtccctgagaaccaattttctgtggctgagggcccagtgtaccaaccaagaggtatgtaggatgccttttggtggaggtggaggggtgttgggggcactgtttccagataatgtgggatcctgaggcccccaggaggtgtccgcttgctttcccttcttcgcttctgtctaaacagactcctttgtatgcatttgaccagcgtgatacaaccagccccttcatgatcacatttgctctccctgccacccaatctcctggatgggcaacccaaagtcacattcagcagctgtggccatgacctctctaacctcagaggccgacatctctgccagttcatattttgccactttgtgattcagcacataaactttcatggccgttatatccagggctgcattgtgacttctgcgggccctatgcacttttctaaacaataaatttgaaatcatacttatgattgtgttgatacacaggcaactatattaatattatatattaaaatattttcttcaaccttaattttttttctattttaaaagaaatgtaaacattgccatgggagtattgtgggccctaggcactgtggctactgtacataatggatccatgggccctccttgtgtctttgttaaagattttactggtttactcttaaaatgtaatcacaattctgttaccacaattttaataatcattcctgttgtcatcaaatatccagtcagtgttcagatttccaagattgttttgtaggttttgtgtgtgtgtgtgtgtgtgtgtgtgtttgactcatgatccaaataaagctgatggtcttctaattctttaaagatctacattttccgtaatttatttaaagtcctttttgtttacttttattatggacaaatttaagcatatacaaaagtggtttattattgctttttttttttttgagatggtcttgctctgtcgcccaggctggagcacagtggcacgatctcaactcactgcagcaacatccgcttcccaggctcaagcgatgctccagcctcagcctcccaagtagctgggactacaggcgccagccaccatgcccggctaatttttgtattttttgtagagacagggttttgccatcttgtccaggctggtctccaactcctgagctcaagcaatctgctcatcttggcctcccaaagtgttggaattacaggtgtgacccactgagccttgcctgttattgctatcttaaaaagaattaatacatgttaaaaatctttttcagttctaattttgaatacagtaaatatcaataacaatattgtaagtaaagcttttcagtgttttcagtaatttaaggggtttatactcttaaaacattgagagatttttttcaaattgagatttaaaaaaattgggaatcactaatctagaagaactgttaaaaatagtcatgcccacctgtgctcacccttagagatctggattcaacccatttggggcgtgagcaaagggacttgtgtaaaatttccccaggcaattccaaagtgcaggctgtgttgagaacctctgctctaaactggagagatcccgtaagaaataagcagccaggtgcagtggctcatgcctgtaatcccagcactttgggggaccaaggcaggtggatcacttgaggtcaggagttcgagatcagcctgttcaacatggtgtaaccttgtctctactaaaaatacaaaaaattcgccaggtgtggtggcacgtgtctgtaatcccagctactggggaggctgaggcaggagaatcacttgaaccagggaagcagaggttgcagtgaaccgagatcatgccactgcactccagtctggtagacagaatgagaccctgtctcaaaaaaaaaagaaaagaaaagaaaagaaaaaaaaggaaataagcaaagatggccgggtgtggtgcctcacacctgtaataccagcactttgagaggctgaggcgggcggatcacctgaggttaggagttcgagaccagcctgaccaacatggagaagccccatctctactaaaaatacaaaattagtcgggcatggtggcacatgcctgtaatcccagctacttaggaggctgaggcaggagaatcgcttgaacttgggaggcagaggttgcggtgagccaagatcacggcattgcactccagcctgggcaacaagagtgaaactctgtcaaaaaaaaaaaaaaaaaaaaaaaaaaaaaagaaataagcaaaggcacagagtgggaaaggcaaccaaatgccctaggtctgaaagggcctcctgggacctgctgcatccagcagaaatgcttgcaagtgcaggcccagacaacccaaaaaacaggggctaaaataaacaggaattcatttttctcataagaaatctgaggatgacagcttccagcattggtttgagcatttaatgatgccatcagggttccagactcttcatatgtttacactccaccctcctacaatgttacccttacatattttctttggctaaactataagcacgtttttcataatagctgttccatttacatcactgtcaaacatgacattcaccaataaagaaaagacgcatgagacgtgttcggcaccccttagctgtagaaatgcctgccaccactttgctgtcatgaaagagccattttatggctattgcaaatgctttgaagatactaagacttgtacctggaagctatagatgcagtgtgggaaactgggaagtataattgccactgaattgttattgatttattactgcaaataaatctatgcaggtcccttctgaaattgagatggtcctgaactgaacaaatgtcttattgacattcataacagtggctggtattccttctttatcctgtttgtcagtttttggaattcactgattagataaataaaaagaatctcacttgctccttactaatgagctccacggaggggcatgatgttggaaaaggcaccatgcaaggcatgattactaagaagacaaagggcttgtcggggagctgttagggagggtcctgagccagggcttgggaaaaacatctcatcattttactgtatctgatgcttggaagtgacatgtgctttgcaaactccagtttatgttttgatgactttgtgcttgttctgcttggttaggattagcttcagctgtgagaaacagaaaaccctggaaacaacagtgtctccaccaagatagaagttcatttctctctcacatgcaaccctagggctggtgtagtgtttaagtgtcagagactcaggttccttctatctatctttttcttccaccagcctcaacatagctcttctctctcaggtccaatatgactgcttgaattccagctttcatgtttgtgttccagtcagctgaaggagaaaggggaaataaggacaacccctcttttttttcgttttttcttttttttttttttttgagagggagtcttgctctgtcacccaggctggagtgcagtagtggatctcagctcactgcaacctccgctccccaggttctagcgattctcctgcctcagcctcctgagtagctgggattacaggcatgtgccaccatgcctggctaatttttgtatttttagtagagatggagtttcaccacgttggtcaggctggtctcaaactcctgacctcaagtgatccacccgccttggccaatacctttaggcaaagcattatagcaggagtctaaaaacaaatgggctgttttgttttgctcggaaatctctccccgagggattgttttgttttttgaagtatttgaaggctaagtatctagagcttgtgctcatggagtagctgccccctttcctcgtgaggccaccattagttacctctgcatatatgtctgcctctgaggtgtctggctgtctgaggaggcctctggctttgttagtacaccactaggatatttgcaacgtggatcaagactttttaatttaatttaattttattttatttttttgagatggagtctttctctgtcgcccaggttggagtgcagtggcacaatctcagctcactgcaacctctgcctcccaggttcaagccattcttctgcctcagcctcccaagtagctaggattacaggtgcctgccaccatgcctgttgcgggaagtcagggaccccaaatggagggaccagctggagccgaggcagaggaacataaattatgaagatttcattttaatatggacatttatcacttccctaataatgctcttataatttcttacgcctgtctttacttcaatctctgaacataaattgtgaagatttcatggacatttatcagttcccaagtaatactcttataatttcttatgcctgtcttactttaatctcttaatcctgttatcttcacaagctgaggatgtacgtcacctcagggccactattgtacaaattgactgtaaaacatgtgtgtttgaacaatatgaaatcagtgcaccttgaaaatgaacagaataacagcgattttagggaacaaggaaagacaaccataaggtctgactgcctgtggggttgggctaaaagagccatatttttcttcttgcagagagcctataaacagacgtgcaagtaggagagatatcgctaaattcttttcctagcaaggaatattgataattaatactctgggagaataattgcattcctgggggggaggtctataaacagccgctctgggagtgtctgtcttatgcggttgagataaggactgaaatacgccctggtctcctgcagtaccctcaggctcactagggtggggaaaaaccccaccctggtgaatttgaggtcagaccggttctctgctctcgaaccctgttttctattgtttaagatgtttatcaagacaatatgtgcacagctgaacatagaccctcatcagtaattctaattttgccctttgccttgtgatctttgctttgccttttgccttgtgatctttattgccctttgaagcatgtgatctttgtgacctactccctgtttgtacaccccctccccttttgaagtccttaataaaaagctgctggttttgtggctcaggtggacatcatggacctactgatatgtgatgtcactcctggcggcccagctgtaaaattcctctctttgtactctttctctttatttctcagactggccgacacttagggaaaatagaaagaacctgcattgaaatattaggggtgggttccccagatacatgcccagctaatttttttgtgtttttagtagagacagggttttgccacgttggccaggctggtctcgaattcctgacctcaggtgatccacccgcctcagcatcccaaaatgctgggattacaggcattagccactgcacctggccatctcaagatggttttaatggttagaaatatcagccaattgaattttcagagacatatgccacctaattttgtattcaatacttaagtcattaaactccagtggtctatatacctgtttggcctctaagacagtttggcctctaagtctgtgagcactttctgtgatgatggaaatgttctacatttatgcaatttaatgtggtggccactattcacatgtggctattgagcacttgaaacatggctagtgcactaagaaactcaatttgaaattcaattttaattttatttaatttaaatggccacaggtagctagctagtgctaccatattagacagcacagctctgaggctcttttaaggacccacataattcaatgaagagacccaagtttaatacagatgtgggatatgcagtcttcataattcaaacacgccaattaatttctgttcctctttttcaagttgggggctttcaagcacaaaggcttttacctggtcttgggcagaatttttctccccaaaattttaccaaaatttgtgctcttttatagtctgtttcttttaactcataaaattaataatggaagacagaggtttttgatgcagttgctttaaaaaaaaccaggttcaggccaggcacagtggctcacacttgtaatcccagcactttgggaggctgaggtgggcggatcttctgaggtcaggagtttgagaccagcctggccagcatggtgaaaccccgtctctactaaaaatacaaaaattagctggatatggtggtgcgcatctataatcccagctacttggggctaaggcaggagaattgcttgaacctgggagggggaggttgcagtgagctaagattgcgccactgcactccagcctgggtaacagagtgagactccatctcaaaaataaataaataaataaataaataaacaaataaataaataaataaaatcaggtttactgagatataatttaaatacagtgaaaccatagctgtacagttgtttatgagtttgacaaacatattcattgtgtaactactactacaatgaagataatatttctattaccccaaaaagtttcctcatggacacagcttttttcaagtcactcctggttaatgtgtcattaggataataaaacaatgttaattcttgaattggatttaggctgtttaaattttgctcaatggattgtacctcggaggtgggagaatttactctggcaacttagtaaaggttggggctgccaagtgaaggcagactgttggtgaatataatttattgggattgaaaaggatacatcagccagattgatgcatgaatgctaatcaagggttgatttagcaagatcttctactaaggaaataatatcatgtacagtgctaatcacatttttttcataattgagttaaatatttaaagtgattagaatagtcactgccacttaatactacttcagaattagctgcttttcttaatatcggtgtaattcacaattcacttccaagctccacctcccttttgactggccaaaatgagttgttaaagagtcctactctttatctcagatttctccaacaatgttatcataattgttattttacatattctcctagggatttgtcactatttcatattacgttgttttgtggggaagtggaattctagaggttcttaagagcttttccagctcccacagttgcaatcgtaagttcagataacatgcccaggggcaggagaaatcaccatagaagctttcttggttctctgtatctcccattaatgtttcataaccttccaccttcatactttcccctccacataccctggtattcaaaatagcccttcttattagattgggttttcctaattaaaagttgccattgatgttatatcccaaagtttctggaattcctaaacattgtcctttgtctaaactgttttaacgtgagtgcagagtgtctccagacacaggttggaacagatctggagggaagaacattggggctgtttgtcccatcgtatgagaggatctggttttagggcaaagctctttaagcttggagaatgaatcgaaggtgtggaagtgccctgtttctgtatgttctaagagaaatgagctcttaacgtttataagctttttgtcttggcattccccttcggtttggtccctagcactgttaaattacatgaattgagggtttgccaaaactactgctaaatttgcagcttctgtatctgctaaaattggactatttttgatacttcctttaacctgttttgtaaccttgttaattttctaatgagcccattgtgctgttgggattccgatatccccaaatctaatgagccatgaccatacacgttagctccattcccactgggttctcaaattctttttcatttttccaattctttagcactttctcttataggcggttctgccttaatttgaaattaaatgagaacttcagccccttcgtctcaccagctgctagcattttaagtgctcaagagccacctgtggctagtggcggctcggttggatagatacagaacatttccctaacagcagaacattgtataggacagcactgctcaagggattgctctccgatgatcacacccactttacagatactaggactgtctaactatgtacactttctttcttgcaaatacgatgtcgaaggctttccctcagtttgtaacttttaacaaatattttagaatctttattgatcaatctctcatacatctgtgcaacaaaaatatatgtattcatttaattctttaattgacaaaaattgaatctgtttatggtatacaatatgatgtttatatatatatatatatatatatatatacacacacacacacattgtttaatggctaaatcaagctaattaatatgtgcattaccttacatattttttgtgttgggtgagaacacttaaaattattcacttagcaatattcaagtacacagtacattgttattaactagagtcaccatgttgtacagtacatatcttgaatttattcctcctgtctaactgaaattttgtattcgctgatgttagtttttacaatcaactcattaaaaacataattaggtcacagaggttaggaggttttgaaaaaaacaaaaaaccaaacaaaaaatgtaattaggtttgtttggcaatctagcaatgcttagtgtgcaatgctttttacagccgctgctaaaagcatagcaaaaccacagaaatctatgtgctgccaaaacctatgtatttggtcgtatttattttgacttgtgttttttgtgtgcttaactttttctctaacttttttttgtaaagaatgctggagtattcccaaattgttgacaaattcccttgtttcctgttctaagcccagatttcagtgttggccactaggtggggataggatcctatttctctatagccttaacatgattttgaatttcgatgctttgcaatggataatctggctttttcctcgaaagctttaaaacatttcttttgtgaattcaaaacaacccacagttttaattctctgtagttatccaataaaaaggaataggaaacaagtgctaaattatttacttacagtgtttctgtatggaaatccttacccccaagacagctggcttcacggcttgactcaatggtgagaaatctgagttgactcacagctttctgacagtattctgatggtaccatgttaggataaattcttggccaaacagaaaatcaagggagacctgcttctccttgtcaaactctaaattaatctactagttcttttcataaagcaaaaggtgaaatgttgaggactctgagttggcgatcaatcgaaatgacttttaaactaagtcccttttaatgatgactgaagacaatattacattaatcactgggtattataaacactggtttctcagtcctctgctgatgagatttgcttgtttgtgtatttctttcttaaaatcccaaatagtgaagtctctcttaagcaatggaggcttattcatagtcaaattccttgcatgtaaaattctctgggtataaagtagattgcctccctcttgtttttctttttcttgagacagggtctcactctgttgtctaggctggagtgcagtggcattatcacggctcactgaagcctttacctcccaggctcaagtgttcctcctgcctcagcttcctcagtacctgggactacatttattttttgtttttttttatttttttgtagagacaggattttgccatgttgcccatgctggtcaagctatctgccctccttggcctcccaaagtgctgggattataggcatgagccaccaggcccagcctgctttcttctgttttaccaagatgcttgacagtggatatataaaatgacaacttccctttctcatatgtggcactgagagatgggcagcctctatttcctacaagaaatatagaatagaaaatgtgtaatttctcatggtgttctgcaaaaattaaaaatttcacagaacactcatctgaatccctggtttgtaactttggctttccaaaacttgcctatatgctaatatgattcataaaacatttgtaataataatttcaaaataaaaattttaaaatgaatttagtcctatatcttctataataaccaatatttccagaaaagtaggatttaagagtatcttctgtaccaatatatgactttctttttcttttttttggagacagagtctcactctgttgcccaggctgaagtgcagtggtgtgatttcagctcactgcatcattcagtcggccgaaggcctggctagaacaaaaaggcagaaaaaaggtgaattcactctctctctgttttggagtagggagtcctatattctcctccccttggacatcagatctccaggttctctggccttcacactcagggacttgcaccagcagccccccaggtttttggtcttggactcagagttactccaccagctcccccggttctcagcccttcagacttggactgagccatgctacaggctcccctgtctcagcagcttgcagaaggcctaacgtggaactcctcagcctccatagttgagggagtgaatccccagcataaatccccactcatctatctacctatatatatccaataaattctgtttctctgaagaagtctgacttcttcagcccccaaaggcccccaaaggcccccaaagcccccaaaggccctagtgctggtctgttacgaacttcctggtagacaatattttacacatggcatcccagctccttgtgggaggaattaagtgtgtcctgtgtggctccagggggacaggatccttggaagcctgagcctggtttctcttaggctttgcccagtgtgcctttccctctgctgagtttgctttgcatccttttactgtaatgaatcagagccctgagtaggaccatatgatgagccctgtgagtcctcctagggcatcatctcacctggggtggctctgaggacccctaacatagctcttcctctggcattggtatctggtaatatataaaatcccccaaaactaacttgtcatcataatttatgaccatatttcatcaaaatttcatgtagtcacatccaagaagttcagttaagaaagaaaaactctttaagcttggttaaggctctgccatttttgaaaattcgtattaatctaataatattgtagcaactataagttttcctgataactttttttttttttttgggagtgggggatggagttttgctcttgttgcccaggctggagtgcaatggtgtggtctcagctcactgcaacctccgcctcctgggttcaagcgattctcctgcctcagcctcccaagtagttgggattacaggcgcccaccaccacacccagctaatttttgtatttttagtagagacaggatttcaccatattggtcaggctggtcttgaactcccgacctcaggtgatctgcctgccttggcctcccaaagtgctgggattacaggcgtgagccactgtgcccagcctcctgattactattatataaaatttggacttagtggcacatcataacatgaaatgactggagacaatatgacttctctctcggtattaaacatcaattaagatgaattacaaaaatcatagtaaactgtattctaaaaccaagcctatgtctgaaaaatctggtatacacacatcttttgaaactaaggatgtgttttcactgtacaacctgcaagaggtgatctggtgaacatagagttatggaataagtgtgtatctataacttagtacaaattatatataaagagaacgataatgtattatgcggctgggcatggtggctcacttctgcaatcccagcattttgggaggctgaggtgggtggattacttgagctcaggagtccaagaccagcctggccaacatggtaaaacctcatctctaccaaaaacaaaaaattagctctcaggtactctagagactgagatgggaggatcgcctgaaccctggaggcagaggttgtagtaagctgagatcatgccattgcatttcagcctgggtgatagagtgagactccatctctaaataaataaaataaaataatatattatgctattatacctattatttaaaattgggatcttatgttgatttctacatttgggaagcatattcctaagaactgacctttatcagtcctgtattgtgttcagtggcaaagccaggcttggtgtctgttccatctgggaacgccaggagtaatggtcccactccttgctgctgagggtacagcatgaatttgggcagcaccatgaaataaagcaaatgtaagaagatcctctatcagttgcactcctatttaataagaagacttgatcatcatcaagaagttaatttctccatgcctgggtaaaaccacactgactcatcctgaggctcttcattggacccagtgatcaccaaatccttcaagcataaaatggccatgtgattatctccttcctctcaggatgaaaggcagacaataacatgtgatttatgttcctcaggaaaggacatgctataaactagagaacttgggaaagaggaagtacatgaattaacatgcaggcacatggtggcatgtgcctgtggtgccagctactgggcaggctgagtggcagcattgtttgagcccaggaggtgcaggctatggtgaactgagatcgtactactgcactccagcctggttaacagaatgagaccctgtctgtctttctctctctctctctctctctcacacacacacacacacacacacacacacacacacacagaaaataaaggagaaaaagaaattgttcttaaacataaaatttaaagtggggttctttgtatcaccacattctttttttttttttttttttgagacggagttttgctcttgttgcccaggctggactgcaatggtgtgatctcggctcactgcaacctccacctcctgggttcaagtaattctcctgcctcagcccctcgagtatctgggattacaggcacgtgccaccatgcccagctaatttttgtatttttagtagagatggggtttcaccatgttggccaggctggtctctaactactgacctcagatgatccacccgcctcagcctcccaaagtgctgggattacaggcatgagccaccatgcccagctgactcttttaaatttcattcagctgtgcgcccagcctcaccacatttttatatgaagaagaaataaaataataattactaattaaataattaaatattatttccttctccttatatgtttgaaaacatcaaagattttctccaaaattatcatagctataaaagagtcaatataatatcaaatggtaacaaattaattcctttatgatgcaaagaatcaatgtaaaattgtgaagaaatatcatccattcacagaagtaactacaaataaaaaatcccaacttgcgtaatgtatttcctcattaagaagaaggcgattatgatgtcctaattttcgttttcttcacttacccctacactctgcagtagtcaggggcttcctgggccatgctggtgcctgacaattctcccacttcctcccagcagctctagcatcttccttccccagccacagaggcgtcccttctgatgtattctggttggttgagccccatcaggctgtttcatctccagcctttctccctggacaggggtagggaaaggagtgctggattcggagctcctccgtccctgcgccgcctcattttctccttggggtctggcgcacagtggccattgcaatacaccctaaagactgaaggagccagcgcagagccaggatcctcctgtgagccatggccctggctgccctgcttagcctctcggaacctgggccatcaggggtgagtgcgcaggtgggcgagggagggtgggggctctgggcgcttctggagcccacagatgctgttttctttcctgttctgttttctctgttctttactgttttgcctgaggctctcttttgctttctctcattctaacaataataaccaccatttactgaacaccccctaagtgccaaacctcatgtccttcctcacaacaccattttcagaaaggcttttattaacacaattttagaaatgaaaagactgagactcaaagagattcataaatgtctcctttcccccacgtcctctcgctgaagagagaagagccagggcttggcaacctcctctggagattctctcgtagattgtagaggtcagcttcctcaaataggagtctgcaatgtgggtttttttccttccttccttccttccttttctccctccccctcctcctcttcttcttctttttcttcttcttcttttctctctctctctcctctctctctctcgacagggtcctgctctgttgcccaggctggagtgcaatcacgtgatcacagttcactgcaaccttgaactcccaggctcaagggatcctcacacctcagcctcctgggtaactgggactacaggtgtctgtcactacacctggataattatatatatatatatatatatatatatatatttttccccttagagatggagtctcactgtatttcctaggctggtctcaaactcctggcctcaagtgatcctcctgttcagcctctcacagcactaagattacaggtgtggggcaccacacccagcccgttagtgactctctctcatttcattcagtcttcaacccactgcattctccctttttcttccccatgtctctgatgctgctctcagggtgacctttatacaacccaaaccagtgatcacttctctgtctctatctcttgtgtgtcatgagtgtgtttgtgatgcgtccgctcctctttcctggatgttttctcctgtctgttgtcttttatgaacccacttcctctttgttttcctcctactttctagtcttctccttttcagcctcttttttcatgtctgtgtttgtctggatgcaggagcacacactcagacccttgctattctgactttatgtacttttcttgagtgacctgatccaaatttagaacttcacttataatgagcttccttccagtctgtgtcactaacctagtgtaccctgggacccaaccatttagctcactatcctcagattaactccatttgttcccacagaaattcaaactaagcatgttccaaacagaacatcttaccttctctcgattatttcatttttcattacctttgcagtcactgatgccccagttctccacgttgggtattctggactccttcatatccctacttctggcacatgatttagtgattcctgtggcttttcgtttcattattgccattcaaacccatccgctgtccgcctcaccccatgttcctgcccctgcctacaccctcatgacttcccatctgatggctgaagagtcctattggtcttgctttcaaaccagcctcctccaacccatcctccctactgctgccccctccaaacacaaatctcatcatgttactgtcctgcttaagatgcttcacaacttcctatgtcctgtgggataaaatgcaaacacctgccatcagcacacaaggcaggttacagtgccgcccggcgcacatctcccctggcttcagtcacactgaagaactgcagttctccttgcaacttcatgcctctctgctcctgagcctgcttctcctgctggacatgtcatttcccctttctctgttttgctaacctcaggtaaacactatccctaggaacctttcctaaatctcatttttcaaaaatgccctctttatgctcctgagtggctccagtgtatatcttatggtactcagtggtgatcaaaataacctatggaaataaaagattaaaaaacacaaaataaaatacacatgtagcaatcttcttttctttgtctctttggattttggatttcaagcagcttgaggacaaggcccaggtcttctgagttacatccttagtgcctaaagagtgaaaattcacaatgagtgtttatttaacagaatgaaaattaacatttgaaggtggaatttgctttaaaatgcacggacctttagttttaggctttgtgaatataataaaaacaaagtaacctaaggtgaacaaacgacatctctgtagcacagcttgtatatcatgtttttcatctgttttttctttgggcttcgtttctgtaggtgagtaattctctagcccataaactcagtggaggaccctcaacatccgtgtgtgacactgaacttgccgtcacttgacgcatccaaggagaggactggttttccccgtgttgggcttggaggggaaatccttgcttaggaccaacaaccatgcagtgtcatttcgcctcacttcctcttccaggctggactccatgctctctcatctttattcttttactgtaatagtaatagacttttttgttgtcaaccttttgctgcgtcttatacatcaggtaaagctaagatactatcccataggtgtttcaaatgcaacaacttttatttccaggtagaactacacttgaaaatatacattcaacaagaacattttgtgaatgttatgtgcatgacaacatttttaaatttactatgacttaaaatgaaagtgttttgataaaattatataaggtaccatttttattctaaaagtaagaacataacttgaagtctataaatagcactaagacttactctggaggtcttttcatgtccttcattatttttttccctgaaagatttttatttcatctccctacttccctgcctttctctgtggctatatcagtattttttatgtctggtcctgtaggggttctgagatcctatgggaatggggtagggggactacgcaattttgtttctaccaggagttgtgtgacttgggtgagttactttacttctgtggtcagttccccaatatgtaaaataatttcctctgttaaatcaagtttagcctaaagttgcctccttacatattttaagtttggcctaaaggtttctctgtacatcatgaactataacaagtggaggtgtaaacagaccatagcctacacttgtgccaatcactgagttttggccaatcatatgtagctaactgtttgaactgtgttcaagttaggcaaacattgagctgtaaccaatctggctgtttctgtacctcacttctgttttctgtatgttacttttctttttctgtccataaactttcttccaccacgcagctgtgctggagactttgagcatactctggcttgggaggctgcccgatttgtgaattgtttattgcgcaattaacctcatttaaaatttattcggctgaagtttttcttttatcaggtggtgtcagaagtggggttggaagtagagcttctaatgacccccagaagtgctgagtgacctagcgaggtaccctccaggcccattgtgtctctttctctctcggagcagctggggatcgtggtaagttctcttgcagattccgaagctccacagatttgtgtgttgagctctctgagtttctttgagtaaatttctgatcctgattgggtttgaaagtcgcgaaagaaattgaactgagtccaggatcggattggctccagtaattaactggcttggatccggttagagacctcttacatctaactggatcagaaagaaaccagtattaaatggcaatattgcaaaggtgtaaaatttggcttttggaaattcacagagatttttatgttctactcctttatttttcttgtgcacttaggtaggaaaaaaaatcattggctaagttgaacaagggacctgagagcaaagccagtatttgaggtaaaaaatgtgatactgaatttctgaagaactgagttccttctggattatacatgcataagtattaggccctggaaggagcaacgccttacagaaattgtccaggcgtggtggctcacacctgtaatcccagcactttgggaggccaaggtgggtagattgcttgaggctaggagtttgagaccaggctggccaacactgtgaaaccctgtctgtactaaaaattaaaaaaaaaaattagccaggcatggtggcatgtgcctgtaattccagctactcgggaggctgaggcacaagaatcacttgaacccaggaggtggaggctgccatgagctgagatcataatactgcactccagcctgggtgacagagactgtgtctcaaataaaatttttttttttttttttactaaagataacttgcagtagaacattccaaaagaacaacactgcactgaagtgcatttgaaaatgagggctcccaaattagtctcatgtacagtctcatgtagggatgcctattgatatgcagaagcttctaaaaaatttcaatatttgcatttaaagactttacaaaaaagaattaaaaagcttaaacaactaattgatttaaaaaattaaatctgccttgcgctttttgctgatggctgtgtgtgacaggattaggcatgtacaggatcatgggacatggggaacttttttctccccaaagcaggaaacttgagagctgatgagatggctggaaaagatccttcatgactgacaagcagctgcctgaactttttttttttttgaaacggagtctcactctgtctcccaggctggagtgcggtggcacaatctcagctcactgcaacctccgcctcctgggttcaagtgattcttctgcttcagcctcccgagtagctgggattacgggcgcccaccaccatgcctggctaattttttgtgtttagtagagacagggtttcaccatgttggtcaggctggtctcgaactcctgacttcaggtgatccgcccaccttggcctcccaaagtgctgtgattaaaggcatgagccaccgcacctggccctgaacttttaatttagtgtcactgcaataggtgggtccttctctgtcctccctgaactctttgccttccccaccctgctgcagacaatgcttttctttctctctttctcttctttcctttttctatctttcttttttttttttttttgaaacggagtcttgctatgtcacccagcctggagtgcagtggtgcgatctcggctcactgcaagctctgcctccgagggtcatgccattctcctgcctcagcctccggagtagctgggaccacaggcgcccgccaccacgcctggctaattttttttttttttgtatttttagtagagacggagtttcaccgtcttagccagaatggtctcgatctcctgacctcgtgatctgcccacctcggcctcccaaagtgctgggattacaggcgtgagccaccacgcccggcctcctttttccagctttctattatatcttgtctagagatcacatgttgaaacttctggctggaggccattccaccccactttgaatagattaaagatagcagagccccaccaggggcaagtttaagccttaccagttcaatattgggcactaagcagagtggctaatgtctatgttttgtcacatgtattttgctgtggctggaagggaaaatgttaattcagttccctcatgcaatctcttgggcagcatcttacaaaattgagaggcttttgcctatggttccctgaaatcagaaaagatgattttcctttgtgttgtggcttggcccccaggctatgtgcagctaacagggtcgctagggccactcagaaagagggaacccagaagcctggcatgctggcaaaagggtaagaatttcttagcagtcaggcttctggcctctctctgtgtggaaacggttgtaggagtagtaaaaatcactgtctcctctgcaaagttttaattaatgataaaaaggatttgtgaggctgggtgcggtggctcacgcctgtaatcccagcactttgggtggccgaggcgggtggatcacgaggtcaggagatcaagaccaacctggctaacacagtgaaacccagtctctactaaaaatacaaaaaattagccgggcgaggtggcgggcgcctgtagtcccagctactcgggaggctgaggcaggagaatggcgtgaacccgggaggtggaacttgcagtgagccgagatcgcgccactgtactccagcctgggcgacagcgagactccgtctcaaaaaaaaaaaaaaaaaaaaaaaggtatttgtgagccaatcttaagctgtagcaaacctggtgtactttgtgctatgaattggtctttctgtgtcatttggtcataaaaggggttaaataggataaaatgtgggcctaggactcccagaagtctgctgttcaagccagcctggcaaactggtcagttacaaactgcgggtccctgaaacaaaaaaacactggataaggtttccctgtcatcttgttttatgtcattgggagcttgaccttataatcacatgatggtactttcttttggtctccaccctctggaggacaggaattttggagttcatgtcatagttagctctaaaaattatcttgagcagttaaaagcctttgcaagctgaaaattggctgctcttaggctcctccttctgggaggaacaatggaaaccaccaacggtgtagcttagtggctaagctttgccatcttatgatggcagccaggcagggttcaattccagctcagggaatgagacctgtttggtttgatatctttctgatctttgctatttgctgattctcttcccctcatgaacaacttctgactctcgtcttgaattttcctttctctgagctacgtttggaaattctagagtttgtaaaaattgcttgctacctttttgaaaatacttcgtacacttgtggttaagtcataaccttgttaaagcttattggtttcacctgggagattacctttggtaaagttcaaaagccagacatattggctgtttggcctggctaaagtcaagtaataagagatttaaaatgattattttaggctgggcgcagtggtccatgcctgcaatcccagcgctttgggaggccaaggaggatggatcacctgaagtcaggagtttgagaccagcctgaccaacatggagaaaccctgtctctactaaaaatacaaaaattagctggatgtggtggctcgcactggtagtcccacctattcaggaggctgaggcaggataatcgctttaacctgggaggcggaggttgcagtgagctgagattgaaccactgaactccagcctgggcaagagagcaagactccgtctctaaaaacaatcaaataatttttttttttttttagaaagagcgctatagttaaaagtcagcttaattaaaagtggatatccaagctataggtatgtttaaagggccttttggttttttctcttcttggatctttgtttttttttaattatttttttctttttagccaactgaattgtttttctccattttgtcttcttgccacttttgttgcacacatgagaggacctaaggtaacttctaacagcctgggactccttgggaaaaacagaggaggcactacgatcctgctttgggatataactcggttttcctcctgaaacaccaggaatcaaaagcagatagatccctctcaaaatctaaggctaaatatccttttggggatggccaacagggtgaaacccagtctctactaaaaatacaaaaattagcctggtgcagtgctgcacacctgcagttccagctactggagagtctgaggcatgagaattgcttgagcctggaaggcggagttgcagtgagccgagattgcaccactgcactccaacatgggtgacagagtgatactctgtctcaaaataaaggaaagaaagaaagagagagagagagtggaaggaaggaaggaaggaaggagggaaggaaggaaggtcatttccacagttaattgcttaatgctggtgcaatttctgaaaacttcacaagtaggcacaattctagaatatggtgtcttttaggaggttcctgaaaggatggaaaggaccccaaaaagtattcttgattacaggtttctgataactttagaatcatatcatttttactgggtaagaattcctggagctttttttttttttttgagacggagtctcactctgtcacccaggctggagtgcagtggcacgatcttggctcactgcaagctccgcctcccaggttcacgccattctcctgcttcctggagcttaaaagactgactggtttataaaactgccatcccaagtagaacacaaattaattgaataccaagaaaatactttgcaagtctttcatgctaaatcacccaatactgaaattgtttagatacacaatttgaagaaactctgtggtctaactcaaattacctatgataacccatcagttatcagtgctatgcacctcaattggagaaacaaccgtgtcaagcatggactcatggagaaccaaggtggctgccttatccttcctgagcttttaaagcttttataatttaaagttctgcattccatgactcatcatggaaaagataaaatgatccaagttaaatgcatattggtgtggtgacttctaaattgctaaaatagtttatgaccaatgtttggtttgccaaacccatattcctgggaagacaatcaaagcttcaggtacattctgctacctcatgagccatttaaacatttatgaagagatttcagtcaattgtcattttcaatgcatgttttctggttgtgtaaaagctttcctatacaagtgaactgatgttataacagtagattattatttcacagtgtattttcaccaggtaaagaaagctttttatggttcactgactgaggacaatcaaccccttcacaatctagaacctgaagattggatcttctgagaacatcagagaaagactgcccttgccatccacactgcagtaaacatcagaaccgtgaactttggcttcatgatctcacaactgagaaggatccctccacattcttggaaatatacacccattggaacccgtaaggtaaagctaaccagggaagtttcttcccagaagaagatggtatccttgatgtgaacagctttcaccaagatcacagatcaagacttctctgctatatggaggctcttatctctgagtattttttcccttgctgatgcctctatgaacagtagaagtgaaaagggggtctgttgtgtgcacttatggggtaggtatacttttattggtgaagggttttgcagccagccttatacatggataacctcacaccttgatagatgaaagatgaaggcccagtgtaggtgagaaattttaatggtacataggttgcctcataatcagtcagaaacagaacattgattcactcccctattccacatcatgggttaaagagaacattgccaggaggccttcagtcttctagaagggcatttttccttaggtcctttttaccatgatttggagtaaaacaggcaatgattagaaatgtatccctcatgataggctctaaacagagtctactgtaagggcgatggttacacaacagattttacattcttttgtgaaagttatgcttaatagtaggattgctgtagattacttactggctaaacagagaagtatctgtgcagctgctggcacttgtggcctatggagaaatacatcacgtcaggtgtacagagattcagttgtaggtaattaatgaagagactgcttaaatgagtaaactctttatttagctcattctttgatctatttaattttgggtggtttggtttatggggaccctgtgtaaggagcatactccaaactcttggtattatcctcctgatagtcataatagtagtctacctggtgcactgtattctctcgaaagttttaaatgtttgcatgcagccatctctagaatgtcaaattgtctctcttcaactagaatgacaagattgaaagaaatgtgtgaccatgatggcattttaacctatgaatgatgtgttgagactggaaacccaaaatgatggtaactgagagtggcgctaaggccctaagctttggtcacattctcacctaagtgagaacctgaccaaaaaggggacatttttaaacaaaatcatgggaggccattgttttggactttaatgaaaggctaaatgcactaagccccaacagaccagaccaaaccaaaatggagtcacttgtgctaaatgtgacatgattaaactaagactttaaggaaacacatagatcctaaaacagaccaggttttgtttttttctcctataaacagaacgttccaacaaaaggaggtaacccttacaaaaataaaattaaaataaaataaaataacctgaaatccttgttcccccttacaaaactcattgttctgctatttcccagggggtttcaagaccaaataagtacatttacaatggtgatagtggcatcgatgactaaagttttggtaaatctctaaaaattgagaagattaccaaaagaggaaaattgttaaatcaagtttagcctaaagctgcctccttacatattttaagtttggcctaaaggtttctctgtacatcgtgaactataacaagtggaggtgtaaacagcctacacttgtgtcaatcaccaagtttcggccaatcatatgtagccaactgttcaaactgtgttcaaataaggatacacccagctgtaaccaattgggtgtttctgtacctcacttctgttttctgtatgtcactttcctttttctgtccataaatcttccaccacatgcctgcaatggagtctctgagcctactctgcctcgggaggctgcctgattcacgaatcgttcattgctcaatttgactcttttatattgaattcagctgaagtttttctttttttcttttttctgtttttttttttcgagacagagtctcactccgtcacccagtctggagtgcagtggcgcaatctcagcccactgtaacctcctcctcccggttcaagtgagtctcctgactcagcctcccaagtagctgggactacagacagcatgcctggctaatttttgtatctttagtagagacaaagaggtttagtagagacaaaggggtttcaccatgttggccaggctgatcttgaattcctgacctcaagtgaaccacctgcctcggcctcccaaagtgctgggattacaggcatgagccaccgtgcctggccagaagtttttctttgaacactttttttttttggggaaggagtctcgctctatctcccagactggagtgcagtggcgcgatctcagctcactgcaagttccacctcccgggttcacgccattctcctgcctcagcctcctgagtagctgggactacaggcacctgccaccatgcccggctgattacaggcgtgagccaccgcgcctggccttctttgaacacttctacgtggaagtgtgaggattcaatgaataagttgagcacatggtacatgttcagtgaatattttctgattgtgttcagtgttatcattattggaatgatgtgagggttgtgtaagtcttcagagaccagggaaacaactgaaatcttctatgagtcatttctatcattgtttatccccattccttttcttttcattcatttttgcatttctcattttctgtgttattcccttgcattcttaaaaactttcccattacctgcttgcttcttgtattctgtgtactttcctatgtgttcctcattctgcagtcttcttccccttcaagcagcagaccatgtgtcaacgtatgcagagtttgtgcagacacacagaccctctggggagtatatgtttgaatctgatgaagatgagcagttatttgtgcacctggacaagaaggagatggtctggcatctgtgagagtttattcacactgtgaggggcagaaaatgaagggaccagggatggaaagggatgggggacaaaacactaagctggcagtcctaaccccagtgtgtttattctactccaggtgtcaaactttctcagtcagaagttgacataaggaagtcaccagcttcggtctcctttaaatctccaggcctaactttcttttgaatctctgctcttcaaccacaatgacttatgtaccccaagacccctctacctcctggctgcctatgatcctcctgcacctagcactcagcaaagggtctgacatttagatagcactcaatcaatatgaagaatttaaagtgtagtgacaaggtggtgcccacactggatggtctgtatgctgtggtctcatcagggacctttctctgcactgcatttttcctgagaaatcccagagttcaataaatacctgtgtatgtcagagctagacacatctgatgcctttctgtgactccttatattctcagtttcctaggaatgcatatcctggacttgtaattgtaggatacaggtgcattatgggtgcagatacctcagttttgcatcctgcaagagttagtctgcagattgttcactccactctgggtacggctgacacctacagcatgcgtccaggggacaaaaatggaaggagatgactctgattggatagtgagaggaacacgggtagctctggtaaactgaccagggataggcgcccaggggcacacaaggcccagaagctgcttgtgagaagtcagggagaaggaagccaacaactggatgtatcagagagccactgagtgctcattatgtgtatcaggagttaagaatccatcctctacacgaaaaggaaagcttagaccaaacatgtcttctaccttgatttacagtaacttaatatgaaatgcaaaacacataaaaattttggattgtaaaaaaaagatcagtgtttgaaagagtgccacacctattgctttgcactttcaacaatggggaggcgtttctcactgtatgaattattagctcaggaggtctaggctggtgaatgaatgcagacttagaggataaatgtcgtctacttgatgcattcaaaaggccaagcaacatttggttaaggagtatttgtgatggcatgcaaagaaagtgttgaaagtgtgttagattatatttatcgttttaaattctgatgcttatttaatttcttaacagtaatgctaaaacatgctcttagtaagttatatgttgaatcagtgctatgttaatatgggccctataacacagatttgcagtctgttcaccactgaatagctaagaatagtggtttcagacctaaatggatgaagacaccaaacatgaggatggggcagctcactgaaatatagtaaatccaggagaggtctatgtccaacaggccaccttatacaatagtttggatggattttcatggttttcttctttcttatgtctaaaccacaatgaacttctttattaactcttactgtttgctaaaaccctcaagaaaaaaaagtgatgagacatgacttggtgtatattcttaacagaaaacaatcatgttgggttttgattactcatggcactaaggagaaaggaacttggttggaggccccatgagagaaatcatgcattgaatccaggaacagaatgatagaaactggcttcagtgcaactactcagcagcagcatcctcttgggaggctgggggtctgtcctcgaagcaggtactgggactaaagaaacagaaaatgcttgttccaaggtacattagtcttttaggcaaggtcagcaaccctgtggaggtaaaaaacagtaatcccaggttgctggcccccttcctttaagtcccaggagagaaaaataacggtgagaggctgaatctcaggctgataaagaatagagttgatctgagcttcctttagcaatggagccatgcaatgctctttccccactcaccccagggctgaggttgaaacaggggttcaggcctgagactctcttcctagaggagcctcagtgtcacaatgtacagaaaggacttatgtcctcctgtaactcccccaacaaggaaatcaaagcaggaatattgcctgtttatgcagatccttgttgaactgaaatgaaaggaagaaagagaatgtattcagctactgaaaccacctcagacaattagagaaacgtttccatcatacttccattgtccatcactcaatggacgctctgcaggagcctgagtaactgggacctcatgcatctggctgcattaagatgccaggctgggattcctctctccttagaagctgtctttgtttcctgactatgtgatttcagcaagctctctggcattgcttttttgtctcagcccctcatcatggaagaagggtgagcaagtcaggagaaaggtgggtatcggtcacctcacaggatttctcacctttcttcctccttctgtgcgtgaagatgtccactccacagatgatgagccccagcatgaagcccctggctcctgtcagcatcttgctctgcacagaatcagactgtgcctctaggaagaacaggctcaggttcagagtcacctccagcagctgcacccctgctcatgtcctgtctgagatcctgcagcctgatgcagaatattggcacgaggagagcgaggggaatacaccttgcatgacaggaaactgagaaacagtcactctctcaattctagaacagagggtgtgacctcaacaacagacaaattcagattcaattagttgcctctcaaaataacttagaataagctaaaaggctgaaggaagacaacagttcccatgtgtaacgtcagttcaggaaggtgtctgcatccctagattcttggacaaggagaggaactatgaatccttaggacctcctaggccgggggcaggcaagtctccattgtccccaggttaaaactacactcagtgtcttctatagaagaaaaatggggtcggacatggtcccagggtatagacacataaaaccagatgagtggaccccagagccagagagtcccctgctcttcagaggtggagtctagagggtcatcagaccctcactccactccacggtgacaggactgtccaggctggggtgctccacttggcaggtgtagatgtttccctgctggggggtcatttccagcatctccaggatctggaaggtccagtctccattacggatcaggttggtggacacgaccccagctgtttcctcctgtccattcaggaagcatcggacttgaatgctgtctgggtagaaatctgtcacgtggtagacaagcaggtcgtggtgctgctggggctccttcttggaggggagatgttcaccctaggctggactaggagtggcgaagtggaaaagtggaatagcatttgagattattatttcttagacatgctcattatggaattgatttctagatgttgaaaataggaatgatggccaggcgcagtggcttacacctgtaatcccagcactttgggaggctgaggcaggtggttcgagaccagcctgactaacatggagaaaccctgtctctactaaaaatacaaaattagctgggtgtggtggtgcatgcctgtaatcccagctactcaggaggctgaggcaggagaatcgcttgaaccccggaggcagaggttgcatgagctaagatcccaccattgcactccagcctggacaacaagagtgaaactccatctcaaaaaaaaaaaaaaaaaaaaaaaaaaaagtaggaatgatgtgattaggtcagcagataaggggagtattgaaactatagaaatagtattgagaagaataggaggcacacaaacttaccagtttgtagcacatttaaaagaaatcttatctatcagccactgattaacagcctttggacaaagaatatttaatcagcagcgacactaccttatcttttgagtgctctatcctgatgcaaaagatgaaaaatttgctcaaatgatttcttgaaattaatatatatataaacaacattctcatggtctattaatccaataactatatttcataaatatatcaagaaaataaagtgagcttgacgtgacttattctgcaagtaacctatggattttttggcctcgcctacaaacactcaaaatcgtcctatttacataatatcctgagcccctacatgcttaaatagtagaaatcccatccttttccctaagttcctcctctgcactgtgttgtcacatccattgaggttctcagataaccaggtgttggctgtgccttggcacctctctatttttgccccctctttttctgccgcttacagatcaatttccacgctaccacctgcagcttttcctttggacctcagccactagtacccttttcctccacagaaggcagaaaagggccaactgcccctagagaacagctcaattacaggaatgttccaaatcagagcttctaggtccttatttactctgttcttgagaacacaaatacactgacatgggcctgggccaggtaaatgaacagtctttaactaacccccaacccttactccctatggcatttttgccttgtgtccaggattattcacattcacagcctcttccctcgatgtgattttatttcagaggcacttggctctcgttctacttcaaccacctccataaactcaacatccatcagactggtcagcccatgtctgaatcccaactgtagattaagtggaacttcttccccataggtgtcctgggaagcatgaaagtcatgggatatatggttgtctgttttaaggtcccagaacattccatgagaagcactttgctccatcttctttgacgggagctggtcagcctggagcacatcagagacctccagggggcgctgcagctaaggcttgatacccagtggcctcatttctgacccagttcaaatatatttcaccaaggcaaggattcctgtttgttctagttgcctttgctcagttaattctagatttgggtgggcatccacactggaatggccagaacttctatcctcctctttcctccgtctcccctacccctgtgtttttctttattctaattcatgcccttattatgatttccctggacaataatagcagtttcttatctcatctccctgcctctggttcctgctctctccaactgacttcacagtcttctgaaaacagatttccagccttgtcattttttttttttttttttttttttttttttgagacggagtctcgctctgtcgcccaggccggactgcggactgcagtggcgcaatctcggctcactgcaagctccgcctcccgggctcacgccattctcctgcctcagcctcccgagtagctgggactacaggcgcccgccaccgcgcccggctaattttttgtatttttagtagagacggggtttcaccttgttagccaggatggtctcgatctcctgacctcatgatccacccgcctcggcctcccaaagtgctgggattacaggcgtgagccaccgcgcccggcctccagccttgtcattttaagatttctgaagattttcaaaaatcttcagtgttctgacacttatctggttacatgggaatcacttgggagctgattaaaaacacagatctccagacctccccacctagggaatctgaatctctaggcagtgagtctgggggaatctttgcttcacagaggatctcaaggagagtcttctgagcagtgaggttggggacctgctggcctagaggagaaatccacactccttagtctggcatcagggggtctctgcaatctggcagctgattaccatgaaagaaaatgctgccatgtcgctgatttgggcctctatgaagtcttagtgacagattttgcaaattgtattacttttatttggacacctctctcaaccaattacgccagcaactttcctaaacccatgtcactctcctcatccttactcaatgtgtgcatcttctccctcttatcagatgaccttcctttcactttcccaggaacagagggatcaatggtgtgacctcctgagcctcctcctcctcccccttcattctttcctctttctctaggacaaaggtccttgtttagtgagaggctcactggtgctttttggtctccttcacgggatttctctcttggccaaattaatacacgagttattaagagattatttttaggcagctaaaaagggtaaaagttctgggtggaattttcctttaataaaaagcagccccaagccattttttctctaacagaaagcagcctgaaaactcaggcatagatatgcaaactagaagcttttatgtaaatgctggcagctgttcctggaagtcaggtaattcaatatggctattctcaccctctttcccttctacgtttacaggtgtcaaggcagcctccaggttaaagcacgtgtacaggtatcatggccgccaccaggtggaggccgcatttgtataataaaatactagggtgggaaggccagtctttttgcaggttatgtaaatgacacacctggtcaaaccaatcccctgagccctatgtaaatcaatcactgcctcctcaagcctctgtacaaaaccaattgctttccaccagaaacaggagaccctctcttgggtgacctgccttatcagcattaggaagcttttcctctcactcctcttttctattaaactttccgctcctaaacccactccttgtgtgtgtccgtgctgtgaattcttttcggctatggtaaagaaccagggtatataccctagacagtggagctgtttcattttgggagctcatccgggatccaaatcagaatggaagatagaaacatcggagtggtgagtatagagcaaacgtcaaatctgttctttaatctcaagaatctcttcataccagtttcctttcatggagaacttcaccatcgcatgaggctgggaaagtcttggggcaactgaaaatttctggccagggcacaccctggtgttattcaaaggcttctggactgaacgcagcctccgacagcctgtccaggtgttggtaatggatctccagctaacccgttgcaaaattttcctttcctttgtatccgtggtcactatgtctcctgtcctctctctctgtgtgtgcaatttgcgggaagttttacagttcagggaaacactcctgttagggaagatcggcaaatgccacaggcagtaactgttactctctatcctctctggcgagcacatggtagtgctaagccaacagcaccacctagtggaaataaaaatcctcttcatcaggcaccttgtcggttttttaccgtaacactgccgcttccaaattctttcgtgccgctagaaaagcctcttctgtgaacgagaaagcactgtcttcaacagtttggagtaaaatgtcctctgtagtgaaattttagttctgatactgtctcatcagcaggaaaaacagccattaggttcctacgttcatttccgtctccaattaggatagtacttaattagcaaggggattttaggttcggaagttaaccagagccattttgctaagggtaaatgtcttagcatgggccgtaatggcaggcaatctagcacactgcctccgttaaaggagcctacccaaagatgacatagtctctctggagatccatttttctgggagccaggcagatcacacaaatttaggacgtcaaaggggatcacataaggtggataagctaaggttgtgtgggtaaagtatggttaatcccatcacttagtttatccagttccacggcttggaggaccacgcctacaaccatgggtggtacatttaacacgttgccaggacccaggaaccaaggagagaaaacagtagggaggacacttccactgtcttctcctccaccctgggtcacaatgaaagaatggggacgaaaggatacttttattctcacttctttttctagatgggtgacagaccagcttcagcttgcacccctctggagtgcactctgaaacactggaactcctttaacctcaggactttgaagagaaaagtgactcattttcttttgcacaagggcatggcttttttactaaacctttgcaagcactgtaagatcagcccagctttttaaataggcatatcaggtaggcctatagaaaataatcccccagaattagaaaggcaatttccaagggaaccatctgagaattccccttatttagggttgccaatatgggggaagtaaagagaaatcagactgttgctgtgtctatgtagaaaaaggaagacataagaaactccattttgatctgtactaaggaaaattcttctgccttgacatgctgttaatctgtaaccctagccccaaccctgtgctcgcagaaaacctgtgctgtattgactcaaggtttaatggatttagggctgtgcagggtgtgctttgttaaaaatgtgtttgtaggcagtatgcttggtgaaagtcattgccattctccagtctcgagtacccagggacacaatgcactgtggaaggccgcagggacctctgcccaagaaagcctgggtattgtccaagggttccccccactgagagagacagcctgagacatggccttgtgggaagggacctgacctgaccgtccccaaggctgattcccataaagggtctgtgctgaggaggattagtgaaagaggaaggcctctttgcagttgagataagaggaaggcatctgtctcctgctcatccctgggaatggaatgtctcggtgtaaaacccgatcatacattctatttactgagataggagaaagccgccttatggctggaggtgagacatgctggtggtaatactgctgtttactgcactgagatgtttgtgtaaagtcaaacataaatctggcctatgtgcacatccaggcacagcacctttccttaaacttatttatgacacagagtcctttgctcacatgttttcctgctgaccctctccccaccattaccctatagtcctgccacatccccctcactgagatgatagagatagtgatcaataaatactgagggaactcagagaccagagccggcacaggtcctctgtatgctgagcactggtcccttgggcccactgttctttctctatactttgtctctgtgtcttatttcttttctcagtctctcgtcccacctgatgagaaatacccacaggtgtggaggggctggcccccttcaacctcaagctcccttttcattacaggaccttaggcaaacaaaggaagacttatgctaattttctgataaccccaataggtatatagaagctgtccagaatttaactcaggtgtttcacctcacatggaaggatgttatgctgctcctaaaccaaactctaaccgcagttgaaaagcaggcagctctgcaggcagcagataattttggagatgagcaacatatctcctataatacaccaaaagggaagaaaagagatagggaaagtgaaaaaaataacagaaacaccattcccagtaggaagggaagcagttcctctcgacaaccccaactgggaccccagtagctctgcaaatgaatagaaatggaagcatttttaaaatatgcatattagagggtctatgaagaactaaggcctgacctcttaattcctctcaactgtctatgatagaccaaaagccagatgggaatcctgcagcttttatggaaaggctgagagaggcactaatagagcacacttccttagcccctaattcagtcaagggatggctcattgtaaagacaagtttattacacaggcagctcttgatattagaaggaaactgtagaagcacgctataggaccagatagcaccttggggaacctcctgagggtggccacttataatagggaccaggaggaggccccccagaaagagagaaagctcaggagaaagacagaggctctagtagcagctttgcaagcttgcaaagtccaagatttctgaggtgcatccgctagttgctatcagtgtggcaagccagggcattttaaaaaggagtgcccaaacagcaagaggaagccacctcaaccctatccagcctgtggtggagaccactggaaatcaaactgcccccggagacggaggtcactggagtcagaaccagtctcacagatggtccagcaggactgatgggtcctggggctcaaaccccagctccagtggctcaaactgccattacagcacgggagccaccaggtgattctggaaattgaaggaaggaaactagacctccttctaaacactcgagccagtctctctctcttttctcctctttaatccaggcctctcttcttcccatagcgtgagtgtaaggggtgtctcaggaaaaactctattccaatatttttctcaacctcctaattgcagttaggaggacctattgtttacacatgcttccaagccattgccacggtggctctactagtcaaaaaagcctccaaattaaccctaggaaataatttaactgtttacaccccacataatgtagcaggattactgtcctctaggggagactttagctaacaaacagcaggtaaagcaagaaatacataaggcaggacaagcaatagtcactctaatgtctctccccagacacaagcactcaattagctgaactaatagttcttgcaagtgcacttaaattaagcaggggaaagatagctaacatttccactgactccaagtatgctttcttagttctccatgctcatgctgctatttaaaaggaaagacattcttttaccactaaagcatctcctataaaatatcaccaggaaattaacaggttattatcctcagttttcctttcacgaaaaatagcagtaatgtattatagggaacatcaaagaggaacagatgaagtagccaaaggaaataggttagctgagcagggagctaagcaggcggcagggaagcctcaaggcattaacacacttcaagcccttttaatctcggaagcctccataaaagaaattaaacctcagtattcccctgcagaaataaaataagccacttcttaagggtattccagccctgaggatgacaaactccatttactggcctccagtcaatggaaagtccttaaaatccttcaccaagctttttcacataggaaaggataaaacttatcatcagtgtgctcagagattgttttcaggcagaaaacctctaagttgtttaaaaatgtaacctctctagctcacttccaacagaaattgacacaactagccaaaggccaaccccaggaaattggaccaccagaaaatttggtattggtgaaaactcatctctctctccttccctaagccaggctgggaagggccctacacaattcttctttcaacccccccagcagtaaaagttacaagtatcaacctctgaatatatcacactcaagtcaaagcctgaaaagctgagggagcaacctttgacagcccagaggaacatcctgaatatcaatgtggagatatagaagatcttaagctgaaaatcataaaaggtaagtaaatgagtgagggctactcgccttagcgccaatcctacctcaccaggtactctttatcatttctacctttcctctcaaaattcactgctcagtattagaacttttttttaatgcatatttgcagagagattttaattatacatgggactgcatttgttactttgtaaatccccaaagggaaacattatatcttggcaagtaaagttttaaatggaaattatttactacgtcacttttgtgggaattgttatcatcatgctgttatttgcaatagaactgtatactgtggcacccacaatgtggaattctggttgtaaaattctaattcctgtaatattttgcctaattatcatctttatgacagaattaataattgcaggaaggatttggtcaagtttgttttgcttatagcaggagtaatagttacagacaagaagtaagcatgaaaattttactatcactaagtttgataggacttttttattgaagattggtaaatggtgcactctaagctatggaaagaaggttacaaataaagggattttatataagaaaggatcttgtatagtaaattcttgtcctaaaaggaaatgactggttgtttaagacaagtcagaaagttgagtacattgtaagagggtctgtgaaagtcatgaaagaatttaataattaagaaatttaataattaaaggaaaggaattgccaagattaacaccaaagttattttagccacccaataacgtttttctcccaatcatatcataagttataaagaatggcctaaaccaaaaattatgccctaatagcaagtcaagggggaaacatgttttctcaaaggaaatgatgcttttatattaacgtttctggtaatgtacagcgacatctagtggagacaaaccagtattacaatccattggtgtaacaggtatcaaactctactgccatagttacagtctataggtggtaatcttaatactcatatggtaaccctatattttaaaccttcttgtaaaatttatctctttttgcctagaagcaatcaaacttcaaatggtgctgcaaacaaagccacacatggacatgccattcttccaagaagccttagatcaacctcaggaggagccccaactgcagccccccgacacgacgccccttttcagcaggaagtagccagaaagaatcgtcgtccaacaccccctaacagcagttatggttacgtctcctgagggaggaaataatacaggagttattaagaaattatttttaggcagctagaaagggtaaaaattctcagtggaattttcctttaataaaaagcagccccaaaccatttcttctctaacaggaagcagcctgaaaactcaggcatagatatgcaaactagaagcttttatatgtaaatgctggcagctgtacctggaagtcaggtacatccaatatggcggttcccactctcttttccttgtcaccacgtttacaggtgtcatggcagcctccaggtaaaaccacatgtacaggtatcctgtccaccaccagttggagaccgtatttgaataataaaagactagggtgggagagtcagtcttttcgtgggctatgtaaatgacacaactggtcaaaccaattccctgagcgctgtgtaaatcaatcaccgcctcctcaacctctgtacaaaaccgactgcattccaccacaaaccgcagaccctcttttgggcaacccactttctcagcatgaggaaggattttttctctcttttcttttctattaaactttccactcccaaacccactcctcacgtgtgtctgtgtcgtgaattttctcggccatgacaaagaaccagggtatataccccagacaatggagccgttacaaaatcacaatgtccagttcccaggatccagtcctatgctcctcccgatgggtcccctctccctgggtggtctcatgtaggccaggcccctcccccgctgcaaactcttctctcacctgcccatcagaccacccatctggcccctcaagcacctcaaacccggccatctccctgcaggtttcttctctgcgtggcctgctgtgccatctccaccttcatctccacaccgcacccctgcacgatgtcctgtggcctcgtttcccctcaccccacatgcagtcagctgccaggcctgatgaagtcccaggggtctctctccctccatcctcctcactccatgctcagcccaatctccgtgctcaccctcctgacaagctccggttgggctcctcccatcaatccccagctcaaagtccccttccctcctggcactaaggtcccttaggccggcccggctgcccctactccctgggcccggcccccacggctgccccaggagccctggttcacagccctcacctcggcgctgccggatgagtggctccatcagctcgtacttgtgtctgcacaccttgtccacctcggctcgcttccgttccataaagtccttctggctattgaagtactcgcctatgggccgccccagctccatcactgctaggaactcccccactgcgctgtcaaaatgcacgtattcctcccggttgtagatgagcccgtccacaacgcgctgagtcccattgaacgcatagcattcctgccgttcctggtagacggaattctctgtgaagagcagggagagatgggggtggtgccactcccaacaacacccccctcctcaatattagctatttcctcaaatcttcccactcaggactggatttaaaaatacgatttttcctactaccgagttctgtggtcctaggcaggtcacagactccaggcatcagttttctcaccacgcagcgagaggatttactgaaaagaatgagactcactgctcagggtggctgagtgatcattagggaggggcgcacgctgaagggaaagcagccctttctgctggcggctggaggaggagggggagacatttcacgtctcagggaggagcagaatctcatcagggggagggtccctcaggcagagaaacagtagggataggaggagttggggacctggagggcagagctgctccccctacccaactccctgcctgacatttccatcctgatgtcagtcctggctcaaatgccacctcctccaggaagccctccattccttctttccctttctacagctaggttctctctcttctctgccagtttcttgagaatacctcaagttgctcttgctgttctgcatgctggacatctctgcatgctggaaatgcagaaatgcatttccatgcattcctccctccctccctcccttccttccttccttctttcttctttcaatggagtatccttccctccctcccttccttccttcctttcttcctttctttctacagagtatcactctgtcgcccaggctggagtccagtggtgcaatctcagctcactgcaacctccgcctccagggttcaagcagttttcctgcctcagcctcctgagtagctgggattacaggtgtgcgccaccacgcccagataatttttgtatgtttagtagagatggggtttcaccatgttggccaggctggtctcgaactcctgacctcgagatctgccctcctcggccacccaaagtgctgagattacaggcgtgagccaccgcacttggccagaaatgcatttcttaaaacttcttgaagtttgccataagaaagactatatagcctgaaagttaattttcactttcaaacatggctgtagaaagacttgatctcaaaacacctggaaaatatcttaatcaatgaaaatcaccagaacaaccagaaagctaagtgactggactcctttaggtttagaggcattgatggtgtcatttttacataaagaaatgtggcagccttttccacctgcagttcttcctagggagcaccatgggcagtgtccggcaggtgcatgtgtatacagaagtagcaatgacccagcacatgtctgagcctcttcagacctgatctgttcctggtcacagtggggaaattaaggtgctgtgatttgcacacagcaaattaaggtttgttttggacacctgtttcatgttctacaaattagcaactcacgtttattaacctcacccctcatagaagatgcacagctggtggcagaggacagtagagaaggggtggggctgggcacagcggcaccgtagactcggcctgtagtttccagtgtcatctctaaggcaagatcccaggactttagatatcttaacccgcctcttctcctagtgccttgggctccagccccctaaacacccaggcccatcgcccccagcccctttagtctgcccctccctattcaagtgccccactctgagtgtgtatcctctcattttaatttgttagtctttgttcctcttcctcattcaccaataagagaacatgttttagtcaagagtaagaatttcaaaactttcttttgcaacatttaactttttaaagggaattttacctgcaaagcagatataagtgatgagtatatggtggaatttgaaacttcattttttttttgtatatggaaaactttatcctgtttgcggaatctttgacaattgagttacccagagcacaatttgaaaaccaatgatctgagtgaattcatctctcactcagaataggttatattaaaatataattgcagaaagatataatggagtccatatgggtaagaaaaggaacatgtcacaggtagggattccagttcttgcactacgactgattactaagttatcttggacaagaaacaaccttctaactctccatttcttgaaaggcaaaatagtaataatactatttaccttgcaaaactgctgtgagaaccaaatgagctcacatatgtcaaatacatagtattgtatctgttactgctcaatctatcttagttcccttcctcttttcactgtgtgacctgtttgaataggagcaaaattctaaataaatgcatatgaaagaggaactggatcagcttatgagctactggaaaacctcaagaagactttccatgggcaccagatcttaatggttgaaaagtgtttgttggctgtttgctgactggatcttcccccctctcttttgtgctagggattttatttgaggagttagattaacagaagagtgagtacccaaagactcaaatgcacaatgagcttctgcaagtgcccagctggtgtgacaggaggactcgggagtgtggccctaatgcttggggtagtgggtggggtgaggtaagaaactcagctgtaaaaagcccattttaaagcttgtcagagacaaaagggtgttgcctccaggagtctggttttttcacctgccgtgtcatctcctgctccctaggtgttgtctcagccaagcttttctccaccctcccctctctcactttaagccacagcctggctccttgtgcctttcctcttgtgctctgaggatggagatgtgtgtggagttggaagagcatgcagggaattgtggaattggccctgcccactctacccactcccctatggctccagctctccctccagcaggttttgattggacattcattctacacggggagctctggtaacccaccctcggttcctgtcacatggctccactgcctcatctcatttcccctaccaacctcaacccagtctttgcccgtccacctgttcactgcccaccatcatcacgctccctcctgtgctttctgctaccccgcaccttgagggtttccatggcgtttcccaacaccacccctcatcctacaaacaactctgcctatggacactgttgctatggacctcctgctggacactgttcagtgtcaccagcgctgctccagcctcctctctccccaacctcacccctctccagttcccagggctgagccattctgctggttagttctcagcacccctgtgactacaagtgcagtttgtccaccctttcccggacaatgaacctgaggtaataggtgaggggctttggggtttgaggggctgtcctcaggagattcgaatactgttaccctggaaaatgaggaggtgacatgagaacagcactttctaggggtgtcctaggtggatgtggaagggtctcagagggagggtctatgcagaaaggtggaagtcagtggaaaactaagacacctactctgcagtccttcctctcagggtgttggtgtaaatttggaccagaaaagtaagaacatcctgagagaaaaacaatgggtcatagaagccataatattacaccagccacaaggagacagcaggagacagaggtttttcccttggttactgctttcttggctgtctgataacctacactcaatctctttcacgtactcacacatccttatctcattcttctgacaggtttcaacccatcctaatactctaaccaagttctggggaggctgggagaaataccttcaacaagagtgcctttaggggctcgaacctgtccccctccctcccatcttgccttcattgtccagggagcattggctcctgctccaccctggagaatgagaggcattctctgtgagcactgaatcctcagtgatacttgtagtctggacacaccagctaagggctctctgcctgagtcccctcaaggttggatgcagatgtgagcacacccaggagtctgcacttgccaacctctctctctgaaaccttgtctgtccaaggttatcctgaacctcttggccccatttccccatagacaagcaacttgacccctgagcacctccccttatttactgtgtccatgttcctggagagagaatagacctggtggatagcaacctatcctataggaggtgagtttgattctccagctgtgatagaaggacactaggccgtggcaggagccccacatgctgtctcagagtctggttccataaagagaaagtcccctaggaattgttccctgagccagaccctccaggaatagcagctctgctcttacctggagtggccctgctctggaccacagatatgagcagcaccatcagtaatgctgtcagagccactgtccaggggccccctgaaacctgcaggatcatcatggagttggaaaaggttggcagaatgaagagagctgcagtcaggaaaacaagaactcattaaagggagctcctgtctgaaatattagagaccatgaacccaagcagtcttctgtgaccctaggattggacagactctgagaaaagaaccaatgggcactgagctttgtatgagtcattgctcactgggcagaaagttagtattaaagatctgacaatatagagccagtgatgctgttacgaggacagatggagaacactgacactcattttaaccagtcagagtcatgagttttggggagatgatgtgttttctttgctctgaaggtgatctcagatattctgctggcccacctacagggattatcatttccccaattctgccacacctcacacacccacaggacatggcctggtgtggaagaaatgctatctcaatgtgtaaaaggtcattcagtggcatgatttagagagattagagtatccatcccagaactgaaaatgaggcctggagtctgttttgcctttgttcaaggccgtgcttcagattagtgcacattcatattttcttcctcccacatgtctgtgagtcctgagatgtgcgggggatactggctccttccataggactgtcatcagggtcagcagggctcagtctaggggccttacacctgggagcatggacacaccacctacactaccatggaagtatgcagcttgaaggacactgcctgtcttggacttcagttctttgtcttcagtatggggatgatatgacctgcctttacagcagggctcttaaggtcaaattagatcaacggatctgtaattgctttggaaaaatgagactaaaaattatacagtgaatgaggaagaaatgaaaaaatgtcataaaagaccctacattttccaaaacatctgattctgtggtgtttatactgaatagtttcataaactttcaaagaatattactccttaatttaaagacctataaatgtgatcctgtacgacctcctaatctaataaagaaaatgtaaaagtggcatcatttgtttatataaatgttaaaatgtaaatagaagactagcatgtaaaattcaagagaagaaaataattatgcagtagaaggggccagtataggattgcggggaaaaagctcacgttccctgccatagtcaccaagacagcatggtactggtataaaaataggcacatagacaaagggaacagaatagagaacccagggataaacccaaatacttacagccaactgatcttcgacaaagcgaacaaaaacatatggtggggaaagacacccttttcaacaaatggtgctgggataattggctatccacatgtaggagaatgaaaccgggtcctcatctctcaccttatacaaaaatcaactcaagatggattaaggacttaaacctgagacctgagactataaaagctctagaagatcacattggaaaaacccttctagacattggcttaggcagggatttcatggccaagaacccaaaagcaaattcaataaaaacaaagataaatagttgagacttaattaaactaaagagcttttgcacggcaaaaggaaccatcagcagaataaacagacaacccacagagtagtcacaatctatacatctgacaaaggactaatatccagaatctacaatgaacacaggcaaatcagtaagaaaaaacaaacaaccccatcaaaaagtgggctaaggacatgcatagacaattctcaaaagaagatatacaaatggccaagaaacataagaaaatgctcaacatcactaatgatcagggaaatgcaaatcaaaaccacaatgtgataccaccttactcctgcaagaatggccatgataaaaaaataaaaaaacagtagatattggtgtggatgtggtgatcagggaactcttctaccctgctggtgggaatgtaaactagtacagccactgtggaaaacagtgaggagattccttaaagaactaaaagtggaactataatttgatc

SEQ ID NO: 35 - DNA, 661 bp, human
tacctggtaagagttggtttctttttatttggaaataactatggtcaactttcattaatgtggaagttgactgataatgttaagagtcaaagtgaaaaagaaagccgatacccatattcaacagtgctttcagttacaacattttttgaatttccttctctaaaacattcacagcagaggtgtccatttcacttgcctgtttcacctctagataccaccacagttgctggggtcatgtgaggtaaaggaatatatccaattgactgttagcccaacatgactatctgcaattctgatagaaaagctactttcagccatgtcttacaaagtgcttaaagctggacagaagactttaaataaagctaaaatcgcttattgcctgagttgaacaagttacaaaccacagctcttcctcctcccctgctgtctcaccaccaattagccttcttgtgaggacaacattagaaatggaactggtttttgagcccagaaacataaaaatttaagtgttcttagcccagcgtggtggctcatgcctgtaattccagcactcttggaggccgaggtggggtgatcacaaggtcaggatttaagaccagcctggcaaccatgggaaactcttgctctactaaaatcccaaaaatagcctggccttgtgggc

SEQ ID NO: 36 - DNA, 3234 bp, human
gtttgaggccggccagtcgtgactgggcggcaatgaggtcagtgactgccgggagtcctgcaggggcggggcggcgccaagcgcagggagcccggctgagtggcagccyagattgaagatggatacgtgacaatcccagggaccgctgcactgacttcatttccttagacaagacacagtgtagggcccggcccgygttggccccaggactcctttggaatatagctgtggacaatgaatcctgcgagcgatgggggcacatcagagagcatttttgacctggactatgcatcctgggggatccgctccacgctgatggtcgcyggctttgtcttctacttgggcgtctttgtggtctgccaccagctgtcctcttccctgaatgccacttaccgttctttggtggccagagagaaggtcttctgggacctggcggccacgcgtgcagtctttggtgttcagagcacagccgcaggcctgtgggctctgctgggggaccctgtgctgcatgccgacaaggcgcgtggccagcagaactggtgctggtttcacatcacgacagcaacgggattcttttgctttgaaaatgttgcagtccacctgtccaacttgatcttccggacatttgacttgtttctggttatccaccatctctttgcctttcttgggtttcttggctgcttggtcaatctccaagttggccactatctagctatgaccacgttgctcctggagatgagtacgccctttacctgcgtttcctggatgctcttaaaggcgggctggtccgagtctctgttttggaagctcaaccagtggctgatgattcacatgtttcactgccgcatggttctaacctaccacatgtggtgggtgtgtttctggcactgggacggcctggtcagcaacctgtatctgcctcatttgacactgttccttgtcggactggctctgcttacgctaatcattaatccatattggacccataagaagactcagcagcttctcaatccggtggactggaacttcgcacagccagaagccaagagcaggccagaaggcaacgggcagctgctgcggaagaagaggccatagctgctccagccggggctccggggcggcagcagagctggcacaccgattctgggaagccccgcgaatgatggcttttgaattaatgaggcagtgaatgttttgtgtttacttctaagggaaatactaactttctttcgcattagtattaattttgaagtagctacaaagtatttttaagaaattataattttatgactgtctggcaggctctgtcagtttagccgcgccggaccgtgtcaagcatctaggagaggagtccatggtgtccaggcatcggggcgtcacacctgttgaggagtggggtggctttgaatgctggaaatggcttcatagtgaagtgcctcccacagggcgggtgggtcagcgttgactctttccarctgcacactcatatgccgtgtgtcttattcagaagtcacattcttttcagttggagagaattgggctaagatagaaaataacatgatttgttccttattaaagtttcccagcgtatgaaattctaagctgggtggggtggctcacgcccgacgtaatcccagcacgttgggaggccgaggcaggtggatcacttgaggccaggagttcgagaccagcctggtcaagatggtgaaaccccatctctactaaaattacaaaaattagccgggtgtcgtggcacacacctgtaatcccagctatttgggaggccaaggcaggagaattgcctgaacccgggaggcggaggttgcagtgagctgagatcgcaccactgcactccagcactccagcctgggtgacagagcaagactctctctcataaaaaaaaaaaaaaaaaaaattctagaccgaagtgtacggcagtgccatctggtggcaagtggtacaaagacaacgctgaggggtagtgactcctgtagcagcagagacgccttggagtttaacccccaccaaccagagcgtgggctggtaaagatgaaatcttgcaagttttttttttttttaaatcatggtacctgttttaaaatgagaagttattattcatactgtgttgctcatttgacaaaataaggtaaggatttcataatcaggttgtctgggtttcagagctgtttttaattgactgagttacctacaggcacccaatctagaccctaattctgtggttggtgttcctctgtagatttcaagacaagtagtgatgtcattttctccctgagctgtagggtggacctggacccctcagagatgctcgactgcagggtcctggggtccctagagtggtcctgcagcagcccctggcaatgagctgcctgatgatgagtcccaaggtacattgttctactgttttatacccaggtagaagttacacagcaatttagcaatgttgttaacagacatacagaattgtgtgtgtgtgtgtgtgtgtgtgtgtgtgtgtgagtgttttgatataaacgtgcaattaaaattcaaagtttattttttatcacaagcacctttgaaatgtacgtggaaaacgtcggctgctcgtgagaatcatgtgtgacttacgttccttatgttttatggaactctcggaacagtgttttgtttttgtttagtttttgttttcgtttttttgrgacggagcctggctttggctcccaggctggagtccagtggtgtgatctcggctcactgcaacctccacctcccgggttccagggattctcctgcctcaccctttcaagtagctgggattrcaggtacctctaccatgcctggctgattttttgtatttttagtagagacagggtttcaccatgttggccaggctggtctctgactcctgactaaaagtgatctgcccacctcggcctcccaaagttctgggattacgggcgtgagccacttcacccggcccggagcggtgtattttgattgctggtgctttaactatattgaccaaggtgtatagtaacctatttatcacattttacgaagcaattttaatcttaaacacatccagcaaatggtgtccctgctgaaacttttaactggaaacctcacacctggcaggcagcactctctgcagccgtgcccttgtggagtcagcaggagctggtgtttttcagccagacagaggcataataaagtgactgatgtttacrgaaaaaa

SEQ ID NO: 37 - DNA, 3080 bp, human
gggggcggggccttgccgctgcggaggccggagacgcggcggcgctggacgcggaggcgctgggcgcacggcgcggagccggccggagctcgaggccggcggcggcgggagagcgacccgggcggcctcgtagcggggccccggatccccgagtggcggccggagcctcgaaaagagattctcagcgctgattttgagatgatgggcttgggaaacgggcgtcgcagcatgaagtcgccgcccctcgtgctggccgccctggtggcctgcatcatcgtcttgggcttcaactactggattgcgagctcccggagcgtggacctccagacacggatcatggagctggaaggcagggtccgcagggcggctgcagagagaggcgccgtggagctgaagaagaacgagttccagggagagctggagaagcagcgggagcagcttgacaaaatccagtccagccacaacttccagctggagagcgtcaacaagctgtaccaggacgaaaaggcggttttggtgaataacatcaccacaggtgagaggctcatccgagtgctgcaagaccagttaaagaccctgcagaggaattacggcaggctgcagcaggatgtcctccagtttcagaagaaccagaccaacctggagaggaagttctcctacgacctgagccagtgcatcaatcagatgaaggaggtgaaggaacagtgtgaggagcgaatagaagaggtcaccaaaaaggggaatgaagctgtagcttccagagacctgagtgaaaacaacgaccagagacagcagctccaagccctcagtgagcctcagcccaggctgcaggcagcaggcctgccacacacagaggtgccacaagggaagggaaacgtgcttggtaacagcaagtcccagacaccagcccccagttccgaagtggttttggattcaaagagacaagttgagaaagaggaaaccaatgagatccaggtggtgaatgaggagcctcagagggacaggctgccgcaggagccaggccgggagcaggtggtggaagacagacctgtaggtggaagaggcttcgggggagccggagaactgggccagaccccacaggtgcaggctgccctgtcagtgagccaggaaaatccagagatggagggccctgagcgagaccagcttgtcatccccgacggacaggaggaggagcaggaagctgccggggaagggagaaaccagcagaaactgagaggagaagatgactacaacatggatgaaaatgaagcagaatctgagacagacaagcaagcagccctggcagggaatgacagaaacatagatgtttttaatgttgaagatcagaaaagagacaccataaatttacttgatcagcgtgaaaagcggaatcatacactctgaattgaactggaatcacatatttcacaacagggccgaagagatgactataaaatgttcatgagggactgaatactgaaaactgtgaaatgtactaaataaaatgtacatctgaagatgattattgtgaaattttagtatgcactttgtgtaggaaaaaatggaatggtcttttaaacagcttttggggggtactttggaagtgtctaataaggtgtcacaatttttggtagtaggtatttcgtgagaagttcaacaccaaaactggaacatagttctccttcaagtgttggcgacagcggggcttcctgattctggaatataactttgtgtaaattaacagccacctatagaagagtccatctgctgtgaaggagagacagagaactctgggttccgtcgtcctgtccacgtgctgtaccaagtgctggtgccagcctgttacctgttctcactgaaaagtctggctaatgctcttgtgtagtcacttctgattctgacaatcaatcaatcaatggcctagagcactgactgttaacacaaacgtcactagcaaagtagcaacagctttaagtctaaatacaaagctgttctgtgtgagaattttttaaaaggctacttgtataataacccttgtcatttttaatgtacaaaacgctattaagtggcttagaatttgaacatttgtggtctttatttactttgcttcgtgtgtgggcaaagcaacatcttccctaaatatatattaccaagaaaagcaagaagcagattaggtttttgacaaaacaaacaggccaaaagggggctgacctggagcagagcatggtgagaggcaaggcatgagagggcaagtttgttgtggacagatctgtgcctactttattactggagtaaaagaaaacaaagttcattgatgtcgaaggatatatacagtgttagaaattaggactgtttagaaaaacaggaatacaatggttgtttttatcatagtgtacacatttagcttgtggtaaatgactcacaaaactgattttaaaatcaagttaatgtgaattttgaaaattactacttaatcctaattcacaataacaatggcattaaggtttgacttgagttggttcttagtattatttatggtaaataggctcttaccacttgcaaataactggccacatcattaatgactgacttcccagtaaggctctctaaggggtaagtaggaggatccacaggatttgagatgctaaggccccagagatcgtttgatccaaccctcttattttcagaggggaaaatggggcctagaagttacagagcatctagctggtgcgctggcacccctggcctcacacagactcccgagtagctgggactacaggcacacagtcactgaagcaggccctgtttgcaattcacgttgccacctccaacttaaacattcttcatatgtgatgtccttagtcactaaggttaaactttcccacccagaaaaggcaacttagataaaatcttagagtactttcatactcttctaagtcctcttccagcctcactttgagtcctccttggggttgataggaattttctcttgctttctcaataaagtctctattcatctcatgtttaatttgtacgcatagaattgctgagaaataaaatgttctgttcaacttataaaa

SEQ ID NO: 38 - DNA, 1078 bp, human
gtgtcgcgcggcgcggtggcctcggtcggtaccctgggcgcggacgagctgcctcattagtattcgtacccacgaggcggcgcacggggccctcggggacagcgagcgtcgcgccatggcttatcactcgggctacggagcccacggctccaagcacagggcccgggcagccccggatccccctcccctcttcgatgacacaagcggtggttattccagccagcccgggggatacccagccacaggagcagacgtggccttcagtgtcaaccacttgcttggggacccaatggccaatgtggctatggcctatggcagctccatcgcatcccatgggaaggacatggtgcacaaggagctgcaccgttttgtgtctgtgagcaaactcaagtatttttttgctgtggacacagcctacgtggccaagaagctagggctgctggtcttcccctacacacaccagaactgggaagtgcagtacagtcgtgatgctcctctgcccccccggcaagacctcaacgcccctgacctctatatccccacgaaggccttcattacttacgtgctcctggctgggatggcactgggcattcagaaaaggttctccccggaggtgctgggcctgtgtgcaagcacagcgctggtgtgggtggtgatggaggtgctggccctgctcctgggcctctacctggccaccgtgcgcagtgacctgagcacctttcacctgctggcctacagtggctacaaatacgtgggaatgatcctcagtgtgctcacggggctgctgttcggcagcgatggctactacgtggcgctggcctggacctcatcggcgctcatgtacttcattgtgcgctctttgcggacagcagccctgggccccgacagcatggggggccccgtcccccggcagcgtctccagctctacctgactctgggagctgcagccttccagcccctcatcatatactggctgactttccacctggtccggtgaccccctggccccagatggcactgagtttttcattcattgaagatttgatttccttgaaaaaaaaaaaaaaaaaaaaaaaaa

SEQ ID NO: 39 - DNA, 1145 bp, human
attctctccccagcttgctgagccctttgctcccctggcgactgcctggacagtcagcaaggaattgtctcccagtgcattttgccctcctggctgccaactctggctgctaaagcggctgccacctgctgcagtctacacagcttcgggaagaggaaaggaacctcagaccttccagatcgcttcctctcgcaacaaactatttgtcgcaggaataaagatggctgctgaaccagtagaagacaattgcatcaactttgtggcaatgaaatttattgacaatacgctttactttatagctgaagatgatgaaaacctggaatcagattactttggcaagcttgaatctaaattatcagtcataagaaatttgaatgaccaagttctcttcattgaccaaggaaatcggcctctatttgaagatatgactgattctgactgtagagataatgcaccccggaccatatttattataagtatgtataaagatagccagcctagaggtatggctgtaactatctctgtgaagtgtgagaaaatttcaactctctcctgtgagaacaaaattatttcctttaaggaaatgaatcctcctgataacatcaaggatacaaaaagtgacatcatattctttcagagaagtgtcccaggacatgataataagatgcaatttgaatcttcatcatacgaaggatactttctagcttgtgaaaaagagagagacctttttaaactcattttgaaaaaagaggatgaattgggggatagatctataatgttcactgttcaaaacgaagactagctattaaaatttcatgccgggcgcagtggctcacgcctgtaatcccagccctttgggaggctgaggcgggcagatcaccagaggtcaggtgttcaagaccagcctgaccaacatggtgaaacctcatctctactaaaaatacaaaaaattagctgagtgtagtgacgcatgccctcaatcccagctactcaagaggctgaggcaggagaatcacttgcactccggaggtagaggttgtggtgagccgagattgcaccattgcgctctagcctgggcaacaacagcaaaactccatctcaaaaaataaaataaataaataaacaaataaaaaattcataatgtg

SEQ ID NO: 40 - DNA, 1840 bp, human
ggaagaagaggctctcccgcgggagcccttgaggaccaagtttgcggccacttctgcaggcgtcccttcttagctctcgcccgcccctttctgcagcctaggcggcccgggttctcttctcttcctcgcgcgcccagccgcctcggttcccggcgaccatggtgacgatggaggagctgcgggagatggactgcagtgtgctcaaaaggctgatgaaccgggacgagaatggcggcggcgcgggcggcagcggcagccacggcaccctggggctgccgagcggcggcaagtgcctgctgctggactgcagaccgttcctggcgcacagcgcgggctacatcctaggttcggtcaacgtgcgctgtaacaccatcgtgcggcggcgggctaagggctccgtgagcctggagcagatcctgcccgccgaggaggaggtacgcgcccgcttgcgctccggcctctactcggcggtcatcgtctacgacgagcgcagcccgcgcgccgagagcctccgcgaggacagcaccgtgtcgctggtggtgcaggcgctgcgccgcaacgccgagcgcaccgacatctgcctgctcaaaggcggctatgagaggttttcctccgagtacccagaattctgttctaaaaccaaggccctggcagccatcccacccccggttccccccagcgccacagagcccttggacctgggctgcagctcctgtgggaccccactacacgaccaggggggtcctgtggagatccttcccttcctctacctcggcagtgcctaccatgctgcccggagagacatgctggacgccctgggcatcacggctctgttgaatgtctcctcggactgcccaaaccactttgaaggacactatcagtacaagtgcatcccagtggaagataaccacaaggccgacatcagctcctggttcatggaagccatagagtacatcgatgccgtgaaggactgccgtgggcgcgtgctggtgcactgccaggcgggcatctcgcggtcggccaccatctgcctggcctacctgatgatgaagaaacgggtgaggctggaggaggccttcgagttcgttaagcagcgccgcagcatcatctcgcccaacttcagcttcatggggcagctgctgcagttcgagtcccaggtgctggccacgtcctgtgctgcggaggctgctagcccctcgggacccctgcgggagcggggcaagacccccgccacccccacctcgcagttcgtcttcagctttccggtctccgtgggcgtgcactcggcccccagcagcctgccctacctgcacagccccatcaccacctctcccagctgttagagccgccctgggggccccagaaccagagctggctcccagcaagggtaggacgggccgcatgcgggcagaaagttgggactgagcagctgggagcaggcgaccgagctccttccccatcatttctccttggccaacgacgaggccagccagaatggcaataaggactccgaatacataataaaagcaaacagaacactccaacttagagcaataacggctgccgcagcagccagggaagaccttggtttggtttatgtgtcagtttcacttttccgatagaaatttcttacctcatttttttaagcagtaaggcttgaagtgatgaaacccacagatcctagcaaatgtgcccaaccagctttactaaagggggaggaagggagggcaaagggatgagaagacaagtttcccagaagtgcctggttctgtgtacttgtccctttgttgtcgttgttgtagttaaaggaatttcattttttaaaaaaaaaaaaaaaaaa

SEQ ID NO: 41 - DNA, 2263 bp, human
aggaagtagggagcggggtggcaggggggggacccgccgcggctgctgccaccgccgccaccaccgcctctgctcgtggcgtgggaaaggaggtgtgagtcccgggcgcgagccgcggcggcgccgctgcgggagggtcggcggtgggaaggcgatggcggatttagataaactcaacatcgacagcattatccaacggctgctggaagtgagagggtccaagcctggtaagaatgtccagcttcaggagaatgaaatcagaggactgtgcttaaagtctcgtgaaatctttctcagtcagcctatcctactagaacttgaagcaccactcaaaatatgtggtgacatccatggacaatactatgatttgctgcgactttttgagtacggtggtttcccaccagaaagcaactacctgtttcttggggactatgtggacaggggaaagcagtcattggagacgatctgcctcttactggcctacaaaataaaatatcctgagaatttttttcttctcagagggaaccatgaatgtgccagcatcaacagaatttatggattttatgatgaatgtaaaagaagatacaacattaaactatggaaaactttcacagactgttttaactgtttaccgatagcagccatcgtggatgagaagatattctgctgtcatggaggtttatcaccagatcttcaatctatggagcagattcggcgaattatgcgaccaactgatgtaccagatcaaggtcttctttgtgatcttttgtggtctgaccccgataaagatgtcttaggctggggtgaaaatgacagaggagtgtccttcacatttggtgcagaagtggttgcaaaatttctccataagcatgatttggatcttatatgtagagcccatcaggtggttgaagatggatatgaattttttgcaaagaggcagttggtcactctgttttctgcgcccaattattgcggagagtttgacaatgcaggtgccatgatgagtgtggatgaaacactaatgtgttcttttcagattttaaagcctgcagagaaaaagaagccaaatgccacgagacctgtaacgcctccaaggggtatgatcacaaagcaagcaaagaaatagatgtcgttttgacactgcctagtcgggacttgtaacatagagtatataaccttcatttttaagactgtaatgtgtactggtcagcttgctcagatagatctgtgtttgtgggggcccttccttccatttttgatttagtgaatggcatttgctggttataacagcaaatgaaagactcttcactccaaaaagaaaagtgttttgttttttaattctctgttccttttgcaaacaattttaatgatggtgttaaagctgtacaccccaggacagtttatcctgtctgaggagtaagtgtacaattgatcttttttaattcagtacaacccataatcatgtaaatgctcattttctttaggacataaagagagccctagggtgctctgaatctgtacatgttcttgtcataaaatgcatactgttgatacaaaccactgtgaacattttttatttgagaattttgtttcaaagggattgctttttcctctcattgtcttgttatgtacaaactagtttttatagctatcaacattaggagtaactttcaaccttgccagcatcactggtatgatgtatatttaattaaagcacacttttccccgaccgtatacttaaaatgacaaagccattcttttaaatatttgtgactctttcctaaagccaaagtttctgttgaattatgttttgacacacccctaagtacaaggtggtatggttgtatacacatgctgccttcttggggattcaaaaacaggtttttgattttgaatagcaattagtgatatagtgctgtttaagctactaacgataaaaggtaataacattttatacaatttccatatagtctattcattaagtaatctttttacagttgcatcaggcctgaacccgtccattcagaaagcttcaaattatagaaacaatactgttctatacgagtgaccgattatgctttctttggcctacattctttattctgcggtgaagttgaggcttataagttaaaacaaaggaactaacttactgtccaccagtttatacagaactcacagtacctatgacttttttaaactaagatctgttaaaaaagaaatctgtttcaacagatgaccgtgtacaataccgtgtggtgaaaat

SEQ ID NO: 42 - DNA, 6755 bp, human
gagagaagcctgatatgtaacccaggcgggtgggagcctcagtctgtcgggctgaggtctggcatctacaaagcctcttggccgtgttctgaacttgaagcctggaggagttctctgctcagcacagccaaggaacagaattagaagaaaaggaaccctggcctgaggcaggtgacaaacattaccaccccagctgtgcacgatgcagcagatgcaaccagatgttcacagaaggagaggaaatgtatcttcaaggctccaccgtttggcatcccgactgtaagcaatctacgaagaccgaggaaaagctgcggcctaccaggacatcctcggaaagtatttattctaggccaggctccagtattcctggctcaccaggtcatactatctatgcaaaagtagacaatgagatcctggattacaaggatttagcagccattccgaaggtcaaggcaatttatgacattgaacgtccagatcttattacctatgagcctttctacacttcgggctatgatgacaaacaggagagacagagccttggagagtctccgaggactttgtctcctactccatcagcagaagggtaccaggatgttcgggatcggatgatccatcggtccacgagccagggctccatcaactcccctgtgtacagccgccacagctacactccaaccacgtcccgctctccccagcatttccacagacctggcaatgagccgtccagcggccggaactcccctctcccttaccggccagacagccgccctctaactccaacttacgctcaggcccctaaacatttccatgttccagatcaaggaatcaacatttaccgaaagccacccatctacaaacagcatgctgccttggcagcccagagcaagtcctcagaagatatcatcaagttttccaagttcccagcagcccaggcaccagaccccagcgagacaccagagattgagacggaccactggcctggtcccccctcatttgctgtcataggacctgacatgaaacgcagatctagtggcagagaggaagatgatgaggaacttctgagacgtcggcagcttcaagaagagcaattaatgaagcttaactcaggcctgggacagttgatcttgaaagaagagatggagaaagagagccgggaaaggtcatctctgttagccagtcgctacgattctcccatcaactcagcttcacatattccatcatctaaaactgcatctctccctggctatggaagaaatgggcttcaccggcctgtttctaccgacttcgctcagtataacagctatggggatgtcagcgggggagtgcgagattaccagacactcccagatggccacatgcctgcaatgagaatggaccgaggagtgtctatgcccaacatgttggaaccaaagatatttccatatgaaatgctcatggtgaccaacagagggcgaaacaaaatcctcagagaggtggacagaaccaggctggagcgccacttagcccctgaagtgtttcgggaaatctttggaatgtccatacaggagtttgacaggttacctctttggagacgcaacgacatgaagaaaaaagcaaaactcttctaagtcccactcgtgaatggcaattagagaaaggactgacagtggcggtgccccataggatgtcatattgaggcccaaacttgattggagaatttgcaaactaccgtcgctcagcaacaccaaaaagagaaagtctggttaaaacaccatgagtcaaatgtcgggccagccaacagtaacacttgccaagaagcatggcgtagaaatttctatgttccgaaacacagagtagtgtccacatgtgaccttttcacattaccttatgtatacaacaggagctgcgttgttttcttctttttcttttcctttatctgttgtccaacaacagtgctgactgtccggataagagctggcaagtgcccttaggatgccgcatgggaaaaatcggttatcataatttcaaagtataaatatatttattatgtagcgctgcggctaagaaggaagagtgaggggtctgtccatggggtggcagtgatttcacacccgcctttcttgaatggcttcgtgttactcagccgtgccctggcaggaatggaactccatcagggaacagggcagctctgtttgaatggggtgaaaaacagcaaaattaattcttagcaagctccttgttctctactgttcaccgggacctggctggcaaatgacttagctattagtatatttaaaaactgttcaaaagcaaaagagaaggaacaggaatgaaaggaaaccttcccttaactctttctgcttcccatagcaggtctggttcctgctccccgcctaggacaggagctgtctggagctccacctttgcaaagaaaggaaaaacacaaattgcccccagattggcccagtggcatgccattaggtgattttgcgtaggggccatatcattcatggccaaaaaaaaccaaaaagcaaaaaacaaaaacaagtcccatgtcctactgactctagttcttccagtcgttatcctctgctgtctctctggcatcctatgaatcagatcaagcccatgctgttgttggtttttaaggtttctttcaataataggctaaggaaagacatgtttttctcttttaaatctctgcaactccaaagtagactccttcgaacgtatttaatttggccttttcagctttcttcttgcccagctctgtcgaattcatgggtgtgtgtgcacatgttggtttcactcacccagagtaattttgtgagcatgcatgtgctttttaatttctgcttgaatgtttgtcctgctgtgttgcagcttctaaagacattgtcaccgagtgtgtgtgactcaaagatcaagagtgaggctaaactgcgaccccaacatcacttccttcatggaaaggtgttggcgctgatgtagctcatggaaggatcagactgggaaccacagaggaaggatgaggtgggatgtggaggtcagagcatctcacgagagtccctcaggctctgcaacactagattcgaatatgagcctagggtttccccaacacgtgcgtgcatatgaaaccacatcatgattcccgacgtgagttagatgagggagagtttgtgtaactccacacccaggagggtaagccactttattatcatgctttggggctgtgcttaagaatttaagctctgttttaaagccgaagaagaaaacatttgaatttaccttcatatgccactaagaacaaaagctctgaagttcttcctgctggcaccaaatattaggattacaagctgtctctctgacaccagtggtaaaaaagcaagtagaatagtttctgagtctgtgttgcagcctctgacacgtggctcactgctgtcatttggggggtggaatgaacagtcactgttctatagcatcctcctgtgctcttacctaaggaatctaaattgtcctagccttccattgctatgcactgaatgaggactactctcgtgtgtgtgtgtgtgtgtgtgtgtgtgtgtgtgtgtgtgtgtgtgtgttggatctactaacatgtttagcaaatggctctgacagggtggccatgagcagatgagaccagctcttgcttggttggaagccacactgcagtttgcagtttagcctttggtgtctcagtggcctcttgcttattccatgctttttctatcccatcctctctctgtgccctcctgcaatggcagccttggcacaatgcctgggtgtcctcatccttgctttactctggaaagtgtggggatggagaggatggtgcatttccagtgcttccttacctgtcaataacaatggtggccacctgggtcccagcacttggctggtggagagatttttttcattatggagctaataaagggtccctacgttttacattgattaatgaattatcacccagacatgtgcagatgaaatgtcaatataagaaaaatcaaggtatttgggaaacatgggcataatcaggtagttttgctaaaattcctcttccttggtctacataaagaagacatgggtctgtcatagaatggggacattagactgaaaactgggacaacccccttccttattttatagagactaggagttaaggggcctgcctaagattgcagtgataaagaactgaaccctaaatcagctcccactaatgaaaccctgctttccttgtatcttttaaactcagttctgcatccaacttgagaagaaaaaaagcttctttccatatcaagtaccatatgagttcatttaaactgcaccttgcagaaatgcattgccagaaagcaccagtagcctcctatctgcaagcagagtagtgctctgctctggggaggggtcattggaaaccataatgcagagtgggccccctactccatttcccagcaaaaggctccagctggagggatgggttgtggggcaacctggttcctgctaactgccagattgaatgtgtgggctagaatgcctgcgcatttagttaaactgggctcagcatgcttgtcctcaaaatgtccatcctggtcacagcacacaagatggctattggtctgcttttaccctaccctgtactatacatgaaaattccagttattaacacactcaaactggtggagcttgttcaccctaggaaggggattgtatatatggcaggcttccctggtgccgatgtaaagggctacatttgggaacatttgacttccttgggactcttaagtgcatactgatggcatgaagtaaaaggggcctcaatgatgataggaaaatcagttcttttaaaatttcttcaagaaaatccaggctatcacatagtctttctgtgtgacttattaggagataggaagagcattgggaaacttgcacagctagctatgcatctacattttggtttggggttagttatgaaatgttcttaatatgacgtgttcaataacttcacataaacttcctgttctccaaaacctcaaagagatagagttaatgagttgttgtttttttttaaatgggggtagttttctatctgtcatgggctctagcatctactccgctacccaattctgtcatctccaagctgagtttcctcttctgaggcagaggctggagcagttctttttcagttctcatcctctccatcccaatccagtatatcaatcaactctaactcggagacgtctagctggcaatgtttctaaaactttcactggatttctttagacattgaagcaaacatttttttctaagaattgcttctcagatgatgatatcaaatgtatatgcttttgcaagtttgaaaagttcaaattaaccacttttgactaggtaagtctttctaaaaaccatttaaagctaactgggtcttagcatcctcctgtgtatggaagagacaggtgaccgctccaggttgggtgctcacagaacccttttcctgactctcatggaagatggtggaaggaaaatagactgtctcatcaaccctcctgtgtcctctgaagcaatctcagtttttattaaccacctcttctgtgtttctggtagctatttaacctgtatttaatctgtacttcctatgccagcctcaattttatttgatttttaaaattattctcttctaaccaatgaagtgtttgtcagtatgccccaaagcttgctcttttgtgctcccttttgaataactttctatccagaaaaagagattatttgggacttgagatttgcagtgataccaacttatagcaatgatgtactttaagggaactacccaactatgttgtgatagaagaaagagaaaccttcactttggcattttttttaatcactgtttatttttctgtttgcggcccaggaagcagtgggaggtggtggcagatatgctttgcatatggattgttatgtttttatttgggcaagtttaatcatggaaaactcaaaaagaaggggggaaatggtcagtttaagccaaaagaaactttctaaacaatgtataggtacacagcaaaattaaacaaatccaacaatttctgaagcttagtgtaattgagtggtggttgttattcaataaaattattcccaaaagtgtttctcctaagagtgcagttcccatgagtcacttcctgaacccattgaccaaaggtggacagagacaatcctgtagaccttgacattcagaaagatgtgagctgcttactgatcatatatgcatacgtttctttacagcagaggaaaccattgtccacaaaactgatgttcttttggggttttatgtacagacttgtccaatcatgtgtgtggttcctgcgagttgctgatgactccgcattgaagctctctgagttctttgattttaagttgggtttatggaattttttcaaatgttggaaggcgtgtggttcttcctgccctccctccccttttggaaatatgaaagcaaatgtttagaagaattccttttgaaaagctgtgtcgtgttccctgtgaaactgagcaggtgtgtgttggcgcgctaagtgccacatgcttgtgtgtagaggaggaggtggccctgccggctccgcgctgctgtgcctgtgatccctacctgctccccgctcctgttgccagcagcactcactgcactcctttgtcatatactctgcatcactgtcatactcacaacttcgtgaataaagttgtgtgctttattcgtc

SEQ ID NO: 43 - DNA, 1607 bp, human
cctaattctcctgaggctgagggagggtggagggtctcaaggcaacgctggccccacgacggagtgccaggagcactaacagtacccttagcttgctttcctcctccctcctttttattttcaagttcctttttatttctccttgcgtaacaaccttcttcccttctgcaccactgcccgtacccttacccgccccgccacctccttgctaccccactcttgaaaccacagctgttggcagggtccccagctcatgccagcctcatctcctttcttgctagcccccaaagggcctccaggcaacatggggggcccagtcagagagccggcactctcagttgccctctggttgagttggggggcagctctgggggccgtggcttgtgccatggctctgctgacccaacaaacagagctgcagagcctcaggagagaggtgagccggctgcaggggacaggaggcccctcccagaatggggaagggtatccctggcagagtctcccggagcagagttccgatgccctggaagcctgggagaatggggagagatcccggaaaaggagagcagtgctcacccaaaaacagaagaagcagcactctgtcctgcacctggttcccattaacgccacctccaaggatgactccgatgtgacagaggtgatgtggcaaccagctcttaggcgtgggagaggcctacaggcccaaggatatggtgtccgaatccaggatgctggagtttatctgctgtatagccaggtcctgtttcaagacgtgactttcaccatgggtcaggtggtgtctcgagaaggccaaggaaggcaggagactctattccgatgtataagaagtatgccctcccacccggaccgggcctacaacagctgctatagcgcaggtgtcttccatttacaccaaggggatattctgagtgtcataattccccgggcaagggcgaaacttaacctctctccacatggaaccttcctgggactttgattttacggatatcttgcttctgttccccatggagctccgaattcttgcgtgtgtgtagatgaggggcgggggacgggcgccaggcattgttcagacctggtcggggcccactggaagcatccagaacagcaccaccatctagcggccgctcgagggaagcacccgccggttggccgaagtccacgaagccgccctctgctagggaaaacccctggttctccatgccacacctctctccaggtgccctctgcctcttcaccccacaagaagccttatcctacgtccttctctccatctatcggaccccagtttccatcactatctccagagatgtagctattatgcgcccgtctacagggggtgcccgacgatgacggtgccttcgcagtcaatttactcttcgggtcccaaggtttggctttcacgcgctccattgccccggcgtggcaggccattccaaggccttccgggctggaactggtgtcggaggagcctcgggtgtatcgtacgccctggtgttggtgttgcctcactcctctgagctcttctttctgatcaagccctgcttaaagttaaataaaatagaatgaatgataaaaaaaaaaaaaaa

SEQ ID NO: 44 - DNA, 5067 bp, human
ctcctccccatcctctccctctgtccctctgtccctctgaccctgcactgtcccagcaccatgggacccacctcaggtcccagcctgctgctcctgctactaacccacctccccctggctctggggagtcccatgtactctatcatcacccccaacatcttgcggctggagagcgaggagaccatggtgctggaggcccacgacgcgcaaggggatgttccagtcactgttactgtccacgacttcccaggcaaaaaactagtgctgtccagtgagaagactgtgctgacccctgccaccaaccacatgggcaacgtcaccttcacgatcccagccaacagggagttcaagtcagaaaaggggcgcaacaagttcgtgaccgtgcaggccaccttcgggacccaagtggtggagaaggtggtgctggtcagcctgcagagcgggtacctcttcatccagacagacaagaccatctacacccctggctccacagttctctatcggatcttcaccgtcaaccacaagctgctacccgtgggccggacggtcatggtcaacattgagaacccggaaggcatcccggtcaagcaggactccttgtcttctcagaaccagcttggcgtcttgcccttgtcttgggacattccggaactcgtcaacatgggccagtggaagatccgagcctactatgaaaactcaccacagcaggtcttctccactgagtttgaggtgaaggagtacgtgctgcccagtttcgaggtcatagtggagcctacagagaaattctactacatctataacgagaagggcctggaggtcaccatcaccgccaggttcctctacgggaagaaagtggagggaactgcctttgtcatcttcgggatccaggatggcgaacagaggatttccctgcctgaatccctcaagcgcattccgattgaggatggctcgggggaggttgtgctgagccggaaggtactgctggacggggtgcagaacctccgagcagaagacctggtggggaagtctttgtacgtgtctgccaccgtcatcttgcactcaggcagtgacatggtgcaggcagagcgcagcgggatccccatcgtgacctctccctaccagatccacttcaccaagacacccaagtacttcaaaccaggaatgccctttgacctcatggtgttcgtgacgaaccctgatggctctccagcctaccgagtccccgtggcagtccagggcgaggacactgtgcagtctctaacccagggagatggcgtggccaaactcagcatcaacacacaccccagccagaagcccttgagcatcacggtgcgcacgaagaagcaggagctctcggaggcagagcaggctaccaggaccatgcaggctctgccctacagcaccgtgggcaactccaacaattacctgcatctctcagtgctacgtacagagctcagacccggggagaccctcaacgtcaacttcctcctgcgaatggaccgcgcccacgaggccaagatccgctactacacctacctgatcatgaacaagggcaggctgttgaaggcgggacgccaggtgcgagagcccggccaggacctggtggtgctgcccctgtccatcaccaccgacttcatcccttccttccgcctggtggcgtactacacgctgatcggtgccagcggccagagggaggtggtggccgactccgtgtgggtggacgtcaaggactcctgcgtgggctcgctggtggtaaaaagcggccagtcagaagaccggcagcctgtacctgggcagcagatgaccctgaagatagagggtgaccacggggcccgggtggtactggtggccgtggacaagggcgtgttcgtgctgaataagaagaacaaactgacgcagagtaagatctgggacgtggtggagaaggcagacatcggctgcaccccgggcagtgggaaggattacgccggtgtcttctccgacgcagggctgaccttcacgagcagcagtggccagcagaccgcccagagggcagaacttcagtgcccgcagccagccgcccgccgacgccgttccgtgcagctcacggagaagcgaatggacaaagtcggcaagtaccccaaggagctgcgcaagtgctgcgaggacggcatgcgggagaaccccatgaggttctcgtgccagcgccggacccgtttcatctccctgggcgaggcgtgcaagaaggtcttcctggactgctgcaactacatcacagagctgcggcggcagcacgcgcgggccagccacctgggcctggccaggagtaacctggatgaggacatcattgcagaagagaacatcgtttcccgaagtgagttcccagagagctggctgtggaacgttgaggacttgaaagagccaccgaaaaatggaatctctacgaagctcatgaatatatttttgaaagactccatcaccacgtgggagattctggctgtcagcatgtcggacaagaaagggatctgtgtggcagaccccttcgaggtcacagtaatgcaggacttcttcatcgacctgcggctaccctactctgttgttcgaaacgagcaggtggaaatccgagccgttctctacaattaccggcagaaccaagagctcaaggtgagggtggaactactccacaatccagccttctgcagcctggccaccaccaagaggcgtcaccagcagaccgtaaccatcccccccaagtcctcgttgtccgttccatatgtcatcgtgccgctaaagaccggcctgcaggaagtggaagtcaaggctgccgtctaccatcatttcatcagtgacggtgtcaggaagtccctgaaggtcgtgccggaaggaatcagaatgaacaaaactgtggctgttcgcaccctggatccagaacgcctgggccgtgaaggagtgcagaaagaggacatcccacctgcagacctcagtgaccaagtcccggacaccgagtctgagaccagaattctcctgcaagggaccccagtggcccagatgacagaggatgccgtcgacgcggaacggctgaagcacctcattgtgaccccctcgggctgcggggaacagaacatgatcggcatgacgcccacggtcatcgctgtgcattacctggatgaaacggagcagtgggagaagttcggcctagagaagcggcagggggccttggagctcatcaagaaggggtacacccagcagctggccttcagacaacccagctctgcctttgcggccttcgtgaaacgggcacccagcacctggctgaccgcctacgtggtcaaggtcttctctctggctgtcaacctcatcgccatcgactcccaagtcctctgcggggctgttaaatggctgatcctggagaagcagaagcccgacggggtcttccaggaggatgcgcccgtgatacaccaagaaatgattggtggattacggaacaacaacgagaaagacatggccctcacggcctttgttctcatctcgctgcaggaggctaaagatatttgcgaggagcaggtcaacagcctgccaggcagcatcactaaagcaggagacttccttgaagccaactacatgaacctacagagatcctacactgtggccattgctggctatgctctggcccagatgggcaggctgaaggggcctcttcttaacaaatttctgaccacagccaaagataagaaccgctgggaggaccctggtaagcagctctacaacgtggaggccacatcctatgccctcttggccctactgcagctaaaagactttgactttgtgcctcccgtcgtgcgttggctcaatgaacagagatactacggtggtggctatggctctacccaggccaccttcatggtgttccaagccttggctcaataccaaaaggacgcccctgaccaccaggaactgaaccttgatgtgtccctccaactgcccagccgcagctccaagatcacccaccgtatccactgggaatctgccagcctcctgcgatcagaagagaccaaggaaaatgagggtttcacagtcacagctgaaggaaaaggccaaggcaccttgtcggtggtgacaatgtaccatgctaaggccaaagatcaactcacctgtaataaattcgacctcaaggtcaccataaaaccagcaccggaaacagaaaagaggcctcaggatgccaagaacactatgatccttgagatctgtaccaggtaccggggagaccaggatgccactatgtctatattggacatatccatgatgactggctttgctccagacacagatgacctgaagcagctggccaatggtgttgacagatacatctccaagtatgagctggacaaagccttctccgataggaacaccctcatcatctacctggacaaggtctcacactctgaggatgactgtctagctttcaaagttcaccaatactttaatgtagagcttatccagcctggagcagtcaaggtctacgcctattacaacctggaggaaagctgtacccggttctaccatccggaaaaggaggatggaaagctgaacaagctctgccgtgatgaactgtgccgctgtgctgaggagaattgcttcatacaaaagtcggatgacaaggtcaccctggaagaacggctggacaaggcctgtgagccaggagtggactatgtgtacaagacccgactggtcaaggttcagctgtccaatgactttgacgagtacatcatggccattgagcagaccatcaagtcaggctcggatgaggtgcaggttggacagcagcgcacgttcatcagccccatcaagtgcagagaagccctgaagctggaggagaagaaacactacctcatgtggggtctctcctccgatttctggggagagaagcccaacctcagctacatcatcgggaaggacacttgggtggagcactggcctgaggaggacgaatgccaagacgaagagaaccagaaacaatgccaggacctcggcgccttcaccgagagcatggttgtctttgggtgccccaactgaccacacccccattcc

SEQ ID NO: 45 - DNA, 3887 bp, human
gcgtttgaatctggtccgagcgcgggaaacggcgggtccccgagcccagggttacaaaataaatgccatttgaacagtgccatctgtcatggaaaaacgtgagacgtttgtacaagccgtgtctaaggagctggttggagagtttttgcaatttgttcaacttgataaagaggcctctgatcctttcagcctaaatgaattactagatgaattatcaaggaaacagaaagaagaattatggcaaaggctgaagaatttattgacagatgtgttgttagaaagcccagtggatgggtggcaggtagtggaagcccagggtgaagacaatatggaaaccgaacatggctcaaaaatgagaaaaagcatagaaataatttatgcaattacatctgtgattcttgcttctgtgtctgtaataaatgaaagtgagaactacgaagccctactggaatgtgttattatattaaatggtattttatatgcattacctgagtctgaacgaaaactacagagttctattcaggatttgtgtgttacctggtgggagaaaggcctgcctgccaaggaagacacaggaaagacagcctttgtcatgttactaaggaggagtctggagactaagacaggtgcagacgtatgtcggctttggcgtatccatcaagctttatattgctttgattatgatttggaggaaagtggagaaattaaagatatgttacttgagtgcttcataaatattaattatatcaagaaagaagagggaagaagatttcttagttgtctcttcaactggaatatcaacttcatcaaaatgatccacgggaccattaaaaaccagttacagggattacaaaagtctttgatggtatacattgcagaaatttatttcagagcttggaaaaaggcttcagggaaaatactggaggcgattgaaaatgattgcatccaggacttcatgttccacgggatacaccttccgaggaggtctccagtgcattccaaagtgcgggaggttctgagttactttcaccatcaaaagaaagttcggcagggagtggaagagatgctttatagattatataagcccatcctttggagaggattaaaggccagaaactctgaagttcgatcaaatgctgcattgttgtttgttgaagcatttcctattagggatccaaaccttcatgctattgaaatggatagtgaaatccagaaacagtttgaagagctctatagccttttagaagatccttacccgatggtccgttccacagggatccttggtgtttgtaaaataacttctaagtactgggaaatgatgcccccgaccattcttattgacctcctgaagaaggtgactggggaactggcatttgacacgagctcagctgatgttcgttgttctgtctttaagtgtctgccaatgattttggacaacaaactgagccacccattgttagagcagctccttccagctctcagatacagtctccacgacaattcggagaaagtgagggtagcttttgtggacatgctgttgaagatcaaagctgtgagggctgctaagttttggaaaatatgtcccatggagcacattctggttcgtctggaaactgattctcgacctgtgtctcggcgcctggtgagcctcatctttaattctttcctgcctgtgaatcagccggaggaggtctggtgcgagcgctgtgtcaccctggtgcagatgaaccacgccgctgccaggaggttctatcagtacgcccacgaacacaccgcctgcaccaacatagcaaagctgattcacgttattcgtcattgcttaaatgcctgtatccagagggcagtgagagagcctccagaggacgaggaggaagaggacggaagggagaaggagaatgtgactgttctggacaaaacactgtcagtaaacgatgttgcatgcatggcaggtttactagaaatcattgtgattctctggaaaagtattgacagaagtatggaaaataataaagaggccaaactttacacgattaacaagtttgcctctgtgcttccagagtatctgaaagtatttaaggatgatcgctgcaagatccctttattcatgctaatgtcctttatgccggcctctgctgtccccccattcagctgtggtgtgatttccacgctgagaagccgggaggagggcgctgtggacaagagctactgcactttgttggattgcctctgctcctgggggcaggtggggcacattctggagcttgttgacaactggctgcccacagagcatgcccaggccaagagcaacacagcttctaaaggtagggtgcagatccatgacacacgcccagtcaaacctgaattggcattggtctacattgagtatctgctgactcatccaaagaaccgcgagtgcttgctctctgctcctcggaagaaacttaaccatcttttgaaagcccttgaaacgtcaaaggcagatctggagtcacttctgcagacaccgggtgggaagcctcgtggcttcagtgaagcagctgccccgcgagcctttggtctccactgtcgcctgagcatccatcttcagcacaagttctgctcagaaggaaaggtgtatttgtccatgttggaagacactggcttttggttagaaagcaaaattttatcttttattcaagatcaagaagaagactacctgaagcttcatagggtcatttatcagcaaattatccagacctacctgactgtgtgtaaagatgttgttatggtaggccttggtgaccatcagtttcagatgcaactcttacagcggagtcttggaatcatgcaaacagtgaagggatttttttatgtttcattacttcttgacattctgaaagagataactggaagttccttgattcagaaaacagattcagatgaagaagttgcaatgctgttggacacagtccagaaagtatttcagaaaatgttggaatgtattgcacggagcttcaggaagcagccggaagaaggcctgcggctgctttattctgttcagaggcctcttcatgagttcattactgctgttcagtctcggcacacagacacccctgtgcaccggggtgtactttctactctgatcgctgggcctgtggttgagataagtcaccagctacggaaggtttctgacgtagaagagcttacccctccagagcatctttctgatcttccaccattttcaaggtgtttaataggaataataataaagtcttcgaatgtggtcaggtcatttttggatgaattaaaggcatgtgtggcttctaatgatattgaaggcattgtgtgcctcacggctgctgtgcatattatcctggttattaatgcaggtaaacataaaagctcaaaagtgagggaggttgcagccactgttcacagaaaactaaagacattcatggaaattactttggaagaggatagcattgaaagatttctctatgaatcatcatcaagaactctgggagaacttttgaattcataaccaagccaacatctccagacatgtaaaaatagggaaaagtgattcaaattgaaatgcctgtgtattttcctattgtttttaatgttaataacccatataatagggaaagggtgggatttttttgtgggaatgtgggaaggtgggggttatggaggagataactcaaaacttcttcaattttgcctagtgcctgcgtaaataatatatttaatataaaggactccaggtatgaatggtgtagaaatccatgattccaagaaaaaacacttttctagcaaacctggttgtttttaaaatgacttttatatatgtaatattgcttggaaactatgagtaataaagcaatgacaacaaaaaaaaaaaaaaa

SEQ ID NO: 46 - DNA, 5745 bp, human
cacagggcctgcagagaggggacccaccgggcaggatgcactggcttccagcaggccacgacatcaacggtgccctggagccctccaacatagacaccagcatcctggaggagtacatcagcaaggaggatgcctccgacctctgcttccctgacatctctgctccagccagctcggcctcctactcccacgggcagcctgcgatgcctggctccagcggggtccaccacctgagcccccctgggggtggaccctccccggggcgccatggtcccctcccacccccgggctacggcaccccgctgaactgcaacaacaacaacggcatgggcgctgcccccaagcccttcccggggggcaccgggccccccatcaaggctgagcccaaggctccctatgccccaggcacactgccggactctcccccagactcgggctccgaggcctactccccccagcaggtgaatgagccccacctcctgcgcacgataacccctgagacactgtgccacgtgggagtgccctcccgcctggagcatccgcccccacctccagcccacttgccaggccccccgccacccccaccacccccacctcactaccctgtcctgcagcgggatctgtacatgaaggccgagcccccgatcccccactacgctgccatggggcaggggctggtgcccactgatcttcaccacacccagcagtcccagatgctgcaccagctcctgcagcagcacggagctgagctccctacacacccctccaagaagaggaagcactctgaatcccccccgagcaccctcaatgcccagatgctgaatggaatgatcaaacaggagcctgggaccgtgacagccctgcctctgcaccccactcgagccccatcgccaccctggcctccccagggtccgctctccccgggccctggttccttgcctctcagcattgcccgtgtccagacaccgccttggcacccgccaggtgccccctccccaggcctcctgcaggacagtgacagcctcagtggctcctacctggaccccaactaccagtccatcaagtggcagcctcatcagcagaacaagtgggcgaccctgtacgatgctaactacaaggagctgcccatgctcacctaccgcgtggatgcggacaagggcttcaacttttcggtgggcgacgacgcctttgtgtgccagaagaagaaccacttccaggtgacagtgtacatcggcatgctgggcgagcccaagtacgtcaagacgcccgagggcctcaagcccctcgactgcttctatctgaagctgcacggagtgaagctggaggccctgaaccagtccattaacatcgagcagtcccagtcagaccggagcaagcggcccttcaacccggtcacggtcaatctgccccctgagcaggtcacgaaggtgactgtggggcggctgcacttcagcgagaccaccgctaacaacatgcgtaagaagggcaagcccaacccggaccagaggtacttcatgctggtggtggccctccaggctcatgcacagaaccagaactacacgctggccgcccagatctcagagcgcatcattgtgcgggcctccaacccaggccagttcgagagcgacagcgatgtgttgtggcagcgggcacaggtgcccgacaccgtcttccaccacggccgcgtgggcatcaacacagaccggccggatgaggcgctggttgtgcacgggaatgtcaaggtcatgggctcgcttatgcacccctccgacctgcgcgccaaggaacacgtgcaggaggtggacaccaccgagcaattgaagaggatctcgcgcatgcggctggtgcactacagatacaagcccgagttcgccgccagcgcgggcatcgaggccaccgcgccagagacaggtgtcatcgctcaggaggtgaaggagatcttgcctgaggctgtgaaagacaccggagacatggtctttgccaatgggaaaaccatagagaacttcctggtggtgaacaaggagcgcatcttcatggagaacgtaggggccgtgaaggagctgtgcaagctgacagacaacctggagacgcgcattgatgagctggagcgctggagccacaagctggccaagctgcggcggctcgacagcctcaagtccaccggcagctcgggcgccttcagccatgcagggagccagttcagtcgggcgggcagcgtcccccacaagaagaggccccccaaggtggccagcaagtcatcgtccgtggttccggaccaggcctgcatcagccagcgcttcctgcagggaaccatcattgccctggtggtggtcatggccttcagcgtggtgtccatgtccacactgtacgtgctgagcctgcgcacagaggaggacctggtagacactgatggcaggtccagccagagctttgggaccacgcagctccgacagtcccccttgaccacggggctaccaggcatacagccctctttgctgctggtgaccaccagcctcaccagctcggccccaggttctgctgtccgcaccttggacatgtgttccagccacccctgccctgtcatctgctgttcctcacccactaccaaccctaccactggtcctagtcttggccccagctttaaccctggccatgttctcagcccaagtcccagccccagcaccaaccgctcaggccccagccagatggcccttctgccagtcaccaacatcagagccaagtcctggggtctttcagtcaatggcattggccactccaagcatcacaagagtctggagcctctggccagccctgcagtccccttccctggggggcagggcaaagccaagaacagtcccagccttggtttccatggccgggcccgccgaggggccctccagtccagcgtgggccctgctgagcccacctgggcccagggccagtcagagccagtgccctccctgacctccatccaggtgctggagaattcgatgtccatcacctcccagtactgtgctccaggggatgcctgcaggcctgggaacttcacctaccacatccctgtcagtagtggcaccccactgcacctcagcctgactctgcagatgaactcctcctcccccgtgtctgtggtgctgtgcagcctgaggtcaaaggaggaaccatgtgaggaggggagccttccacagagtctccacacccaccaggacacccagggcacctctcaccggtggccaataaccatcctgtccttccgtgaattcacctaccacttccgggtggcactgctgggtcaggccaactgcagttcagaggctctcgcccagccagccacagactaccacttccacttctaccgcctgtgtgactgagctgccctcctgaggcagcaccacaccagggaccaggggtgcccaggcaccccccaacactggatgcaatggtgttacactggagcccgctgcaggccagctctgctgttcactggccctacccgagactggtgaaactggaagtcttcacactggagttgctgttccagctggtcgcccctcacggcacagagggaacctgagagccagagacttcttgggccttcctgcctgccaccccctaggggccaggacaggaccagtttacctctttccagatatggtggttggagggctggttcaggtgccctggagggaaggggaagcctgtggccctgatttgttcagagcccattctcccttgcctccccttttgagactggagccaacccttttggagagaggacctgcccacctttgagatcagcagggggctcggatccagccctaagagacttgggtggacccccatgagtcaatggagggcagacggctctcccccttaaagctgttccctgggggatggcttggtagtggactttctggggtttgcctgttacgccagactcggacttctaagctttaagtgtggcccaggaggtttcttctccctgggagggcttggctcccaagaagtcccagggcagccgaggccagccctgcctgggttggagaaactgactttgtgccttaagtctactcagtgcctggtgaagccaccctcagcccttcacaggcctgaaccagtaggggccagtgggccaggtaagccctagagccttgaaccaggaatatccaggaagaggaaattccctttgagcccccagatggtattgcagcttcactgcctgcgttcctgggagcgtctggagctcacagtgatcagtgaccacatcattctctctgagcagaggagcaggaatccctcaagcagcagcctggtcttggctggtgggcagatgcaaatagcttttgctgttattaatgaagtaattactaaatgcacttaaaccagggcaggaaggaatggaaggatggagctagaaagctcagagtgggccagagcaggggtgtgacacttgcaaagacagggctctgactctgatccctcccagggagcctccgacacccatcccactcccaaccaccaagaccctgggttagggaagaagttgtatcttaagtgccaccttcaagtttcttagtggtgcctggtgcattccgaggctacatccaggctcatggaaggagtgtagtattcatttagccatgtctgccatgggtccagaaatgggaaagggaattgctgtccttgccctgtggtatgctgccacctctttgggaagcaggccttgcccctgtcccaccactcattctcagctttgaatgggaggcctttctatagtggaggcctttccttgaagcctatgaactgcaggcccccttttgccattgatctcaaagcacttgtcctcaggatagggaagagcagggggatgcaggaatagcagggatagcttgctcccagccccctccccaatttggttccgttgacataggaattttacgattcccaaaccatgcaggggctgagccttccttatgatgactttgttctccctcccactgggggaatcctccctatgccttaaaactgccgagccccactccatgtaataggattcctgggcttcctcaatgggggttcatgttcttggactgcgggccctcagtccttaactggaaagtgaccgtccactgccccatggagcccatctggacacagcacagccccaaaaccgttagcagctggctctgtttccaagcctggggaggggttcctcagtgcaggagttggggacaggctggggatccaagctgcttgagggggtcaaccttggaccaaagttgccttaagcctgtggtaaaagggcttcagggaaggtaagtgggccacctgctggaagctgccagctgcccggctggcaatggtgtgagtgtcttggccctgtccctgccctggggtccagcaggtcatccctcccttcttctctctcctttggcgtttgttcctgtagtcactgggctaatctccccctagcttcaagctgtacatagggcctcccagtgcaaatcctcctgcccataccgtgcacccttagaagcctgcgtgtgcatagagcgccccctacttcccagttaactcccagttcttctccctgagcttggtatttgtcatgtgccaactctgactctgaggtgggcagtgagggaagcagccccgggcctgcttgcttcctgtccccgaaatgttcgtttcttctgaagtaaatatacatatataaataaatgtataaatactgctttgtatctg

SEQ ID NO: 47 - DNA, 5261 bp, human
ctcaggcacgtctagattttcccacttacataggtcttgttaagaaaccagtcctgccttcttgccactcgtgtctttcgatggctcccttcccgaagtcccgctgcctctaagcggagtgttaagcggggctctcggaagccggtggaccgagatttccccgggtggggcgggcgcggtgtagcggcccgcgggctgacttgctcccggctgtcccccggccccagcgaccatgccccgtaaaggcacccagccctccactgcccggcgcagagaggaagggccgccgccgccgtcccctgacggcgccagcagcgacgcggagcctgagccgccgtccggccgcacggagagcccagccaccgccgcagagactgcaagtgaggaacttgataatagaagtttagaagagattttgaacagcattcctcctcccccgcctccagcaatgaccaatgaagctggagctcctcggcttatgataactcatattgtaaaccagaacttcaaatcctatgctggggagaaaattctgggacctttccataagcgcttttcctgtattatcgggccaaatggcagtggcaaatccaatgttattgattctatgctttttgtgtttggctatcgagcacaaaaaataagatctaaaaaactctcagtattaatacataattctgatgaacacaaggacattcagagttgtacagtagaagttcattttcaaaagataattgataaggaaggggatgattatgaagtcattcctaacagtaatttctatgtatccagaacggcctgcagagataatacttctgtctatcacataagtggaaagaaaaagacatttaaggatgttggaaatcttcttcgaagccatggaattgacttggaccataatagatttttaattttacagggtgaagttgaacaaattgctatgatgaaaccaaaaggccagactgaacacgatgagggtatgcttgaatatttagaagatataattggttgtggacggctaaatgaacctattaaagtcttgtgtcggagagttgaaatattaaatgaacacagaggagataagttaaacagggtaaagatggtggaaaaggaaaaggatgccttagaaggagagaaaaacatagctatcgaatttcttaccttggaaaatgaaatatttagaaaaaagaatcatgtttgtcaatattatatttatgagttgcagaaacgaattgctgaaatggaaactcaaaaggaaaaaattcatgaagataccaaagaaattaatgagaagagcaatatactatcaaatgaaatgaaagctaagaataaagatgtaaaagatacagaaaagaaactgaataaaattacaaaatttattgaggagaataaagaaaaatttacacagctagatttggaagatgttcaagttagagaaaagttaaaacatgccacgagtaaagccaaaaaactggagaaacaacttcaaaaagataaagaaaaggttgaagaatttaaaagtatacctgccaagagtaacaatatcattaatgaaacaacaaccagaaacaatgccctcgagaaggaaaaagagaaagaagaaaaaaaattaaaggaagttatggatagccttaaacaggaaacacaagggcttcagaaagaaaaagaaagtcgagagaaagaacttatgggtttcagcaaatcggtaaatgaagcacgttcaaagatggatgtagcccagtcagaacttgatatctatctcagtcgtcataatactgcagtgtctcaattaactaaggctaaggaagctctaattgcagcttctgagactctcaaagaaaggaaagctgcaatcagagatatagaaggaaaactccctcaaactgaacaagaattaaaggagaaagaaaaagaacttcaaaaacttacacaagaagaaacaaactttaaaagtttggttcatgatctctttcaaaaagttgaagaagcaaagagctcattagcaatgaatcgaagtagggggaaagtccttgatgcaataattcaagaaaaaaaatctggcaggattccaggaatatatggaagattgggggacttaggagccattgatgaaaaatacgacgtggctatatcatcctgttgtcatgcactggactacattgttgttgattctattgatatagcccaagaatgtgtaaacttccttaaaagacaaaatattggagttgcaacctttataggtttagataagatggctgtatgggcgaaaaagatgaccgaaattcaaactcctgaaaatactcctcgtttatttgatttagtaaaagtaaaagatgagaaaattcgccaagctttttattttgctttacgagataccttagtagctgacaacttggatcaagccacaagagtagcatatcaaaaagatagaagatggagagtggtaactttacagggacaaatcatagaacagtcaggtacaatgactggtggtggaagcaaagtaatgaaaggaagaatgggttcctcacttgttattgaaatctctgaagaagaggtaaacaaaatggaatcacagttgcaaaacgactctaaaaaagcaatgcaaatccaagaacagaaagtacaacttgaagaaagagtagttaagttacggcatagtgaacgagaaatgaggaacacactagaaaaatttactgcaagcatccagcgtttaatagagcaagaagaatatttgaatgtccaagttaaggaacttgaagctaatgtacttgctacagcccctgacaaaaaaaagcagaaattgctagaagaaaacgttagtgctttcaaaacagaatatgatgctgtggctgagaaagctggtaaagtagaagctgaggttaaacgcttacacaataccatcgtagaaatcaataatcataaactcaaggcccaacaagacaaacttgataaaataaataagcaattagatgaatgtgcttctgctattactaaagcccaagtagcaatcaagactgctgacagaaaccttcaaaaggcacaagactctgtcttgcgtacagagaaagaaataaaagatactgagaaagaggtggatgacctaacagcagagctgaaaagtcttgaggacaaagcagcagaggtcgtaaagaatacaaatgctgcagaggaatccttaccagagatccagaaagaacatcgcaatctgcttcaagaattaaaagttattcaagaaaatgaacatgctcttcaaaaagatgcacttagtattaagttgaaacttgaacaaatagatggtcacattgctgaacataattctaaaataaaatattggcacaaagagatttcaaaaatatcactgcatcctatagaagataatcctattgaagagatttcggttctaagcccagaggatcttgaagcgatcaagaatccagattctataacaaatcaaattgcacttttggaagcccggtgtcatgaaatgaaaccaaacctcggtgccatcgcagagtataaaaagaaggaagaattgtatttgcaacgggtagcagaattggacaaaattacttatgaaagagacagttttagacaggcatatgaagatcttcggaaacaaaggcttaatgaatttatggcaggtttttatataataacaaataaattaaaggaaaattaccaaatgcttactttgggaggggacgccgaactcgagcttgtagacagcttggatcctttctctgaaggaatcatgttcagtgttcgaccacctaagaaaagttggaaaaagatcttcaacctttcgggaggagagaaaacacttagttcattggctttagtatttgctcttcaccactacaagcccactcccctttacttcatggatgagattgatgcagcccttgattttaaaaatgtgtccattgttgcattttatatatatgaacaaacaaaaaatgcacagttcataataatttctcttcgaaataatatgtttgagatttcggatagacttattggaatttacaagacatacaacataacaaaaagtgttgctgtaaatccaaaagaaattgcatctaagggactttgttgaactttatgctgaagattcttcaagttgattcagtgtattactgatttttttctatttgtaaaggattatgagttgtataaaatacatactccctaaactagatcatgaaactggtttctgttttatgcagttgtcatttgtaaagtctaataaaatattctctataattgcttctagattacaaaaatatgacaatcttgtaagtagcagactatggagaaaaatgagttacctggagggtcaggtaacttgccaaactaaaaagtatgttagttgaggcaaagtcctaagcaaggttgtgctatcaaggctcagcataccttcgtgggcctttgatttaccaacactggaaatgcctgccaactaatcttggatagattctttaaggcattccacttagcttgccagttgagacaatcaccacagttattacccaaatactatgaacatatttttgtaaaccagtcattctgaattatagtgatgagaatttaaatatatgcttttctagaatttgatgtttgaccatttatgacttaattaccagagagccagtaaattaggacagtgtttcaacaagcctaggctatctcgtaagttgaaaaatatcccactatagttgcttcatgagtatgaagtaagatggcctctgatttacactggttcaatttacaaattttcaactttatgataggtttatccgggtactaaatgcatttcaacttgatagtttcaacttatgataggtttaccaggatgtagtcccactgttgaggagcatctatttaggggttaattactttagtaataagtggaaagtaagataccttgagtaatgtttgcctataaaattgtcagcgtatttttacactattggctcaagaatgttataatgctaagggacataagttggcaaccacttggtttttggaaggactttcggtattgtattagaagtctgccctagctgttaaatttctgggtatttatcctaaggaattaattaaagagttaattgttcctttcttcagtgggccattgttttagatatttaaaaaatccaacagtttctatcataatgtaactgtaaaaatgtaaacacattattagcatggacttttaaataaagatttaaagaaagcaaaaaaaaaaaaaaaaaaaa

SEQ ID NO: 48 - DNA, 924 bp, human
atgctgaatacaacctcagtcaccgaatttctcctcttgggagtgacagacattcaagaactgcagccttttctcttcgtggttttcctcaccatctacttcatcagtgtgactgggaatggagccgttctgatgattgtcatctccgatcctagactccattcccttatgtatttcttcctgggaaacctgtcctacctggatatctgttactctacggtgacactgccaaaaatgctgcagaactttctctctacacacaaagcaatttctttcttgggatgcataagccagcttcatttcttccactccctgggcagcacggagtccatgttgttcgccgtgatggcatttgacctctctgtggctatctgcaagccacttcgctacactgtcatcatgaaccctcagctctgtacccagatggccatcacaatctgggtcattggttttttccatgccctgctgcactccgtaatgacttctcgcttgaacttctgtggttccaaccgtatccatcattttctctgtgatattaagccattgctaaagctggcctgtgggaacactgagcttaatcagtggctactcagtactgtcacggggacaattgccatgggccccttctttctgacacttctctcctatttctacattatcacttatctcttcttcaagacccgttcttgtagcatgctctgtaaagcactgtccacttgtgcctcccacttcatggtagttattcttttctatgcacctgttcttttcacctatatccatcctgcgttagagagcttcatggaccaggaccggattgttgccatcatgtacactgtggtcactcctgtactaaacccactgatctatactttgaggaacaaggaagtgaagggggccttgggtagagtgatcagaaggctttga

SEQ ID NO: 49 - DNA, 2496 bp, human
cgagtgcatctggaatacgcagagtcagtaagaccatggctacgtcctcgatgtctaagggttgctttgtttttaagccaaactccaaaaagagaaagatctctctgccaatagaggactattttaacaaagggaaaaatgagcctgaggacagtaagcttcgattcgaaacttatcagttgatatggcagcagatgaaatctgaaaatgagcgactacaagaggaattaaataaaaacttgtttgacaatctgattgaatttctgcaaaaatcacattctggattccagaagaattcaagagacttgggcggtcaaataaaactcagagaaattccaactgctgctcttgttcttggtgtgaatgtcacagatcatgatttgacattcggaagtctaacagaggcccttcagaataatgtcacaccatatgtagtctcattgcaagctaaagattgtccagatatgaaacattttttgcaaaagttgatctcacagttgatggactgctgtgtagatataaaatccaaagaggaggaaagtgttcacgtcacccaaagaaagacacattattcaatggattcactttccagttggtatatgactgtcacacagaagacggacccaaaaatgctaagcaaaaaaaggactacttctagccaatggcagtctcctcctgttgtcgttatcttgaaggatatggaaagctttgccacaaaagtactacaagacttcataattatcagcagtcaacatctccatgaatttccactaatactcatttttggaatagccacatctcctattatcatccaccgattgcttcctcatgcagtatcatctctattgtgcatagaactgttccaatctttgtcttgtaaggagcacctgactacggtactcgataagctacttcttacaactcagtttccctttaaaataaatgaaaaagtattacaggttctgaccaacatctttttgtatcatgatttctcagttcaaaactttataaaaggacttcagctttctctattagagcatttctattcccagcccttaagtgtcctgtgctgtaatcttccagaagccaaaagaagaataaattttttatcaaataatcaatgtgaaaacatccgacgtctaccatcttttaggaggtacgtggaaaagcaagcttcagaaaagcaagttgcgctcttgaccaatgagagatatttgaaggaggaaacacaattattactagaaaacctgcatgtttatcatatgaattacttcctggttttgagatgtcttcataagttcacctcttctcttcccaagtatccactaggtcgacagatcagagagttgtactgtacatgtttagaaaagaacatatgggattcagaggagtatgcatcagtcttgcagctgctgaggatgttggcaaaggatgaactgatgaccatacttgagaaatgtttcaaggtttttaagtcttattgtgaaaaccaccttggcagcacagctaagagaatagaggagttcctggcccagtttcagagcctcgatgaaaccaaagaggaagaagatgcttctgggtcacagccaaaggggcttcagaagacagacctctatcatcttcagaagtccttattggaaatgaaggagttaagaagaagtaagaagcaaaccaaatttgaagtactcagagaaaatgttgtgaacttcattgactgtctagtgagagaataccttctgcctcctgagacacagcctctccatgaggtggtgtacttcagtgctgcccatgcccttcgtgagcatttaaatgctgctccgcgaattgccctccatactgcactcaacaatccttactattatctcaagaatgaagcactgaaaagcgaagaaggctgcattccgaatatcgccccagacatctgcatagcatacaaactgcacctagagtgtagcaggctcatcaacctcgtggactggtcagaggcttttgcaacagttgtgacagctgctgaaaaaatggatgcaaattctgcaacctcagaagaaatgaatgaaattatccatgctcggtttattagagctgtttctgaactagaacttttaggatttataaaacctaccaaacagaagactgaccatgtggcaagactaacatggggaggctgctagaaagcaaataagcaaagccagaactatcacatttagcttaagagaaaaaggtgaccagtcatatttacatatattagaggagcctgttttgttgagaagataaatgtgtaacccccattgatgtttaaccagaaaagtacattgctaaccccaaacaggcatgtatcaaaacacctgtggagtactttagactccaacaaataataatgtaactaaaactgctcacacattttactgtactttccaaagtcattactaaattgtgagtaaatcattcttgaacttagagtatgtaaatgtaataaattccgttatccaggagtat

SEQ ID NO: 50 - DNA, 4916 bp, human
agaattcggagcgcggaagagccagagctgcgagcgcctggagctggatctctctccggtcgcgcacgccgaggccagtagggagagaagatggtggttctccgcagcagcttggagctgcacaaccactccgcggcctcggccacgggctccttggacctgtccagtgacttcctcagtctggagcacatcggccggaggcggctccgctcggccggcgcggcgcagaagaaacccgcggcgaccacagccaaagcgggcgatgggtcatcagttaaggaagttgaaacctaccaccggacacgtgctttaagatctttgagaaaagatgcacagaattcttcagattctagttttgagaagaatgtggaaataacggagcaacttgctaatggcaggcattttacaaggcagttggccagacagcaggctgataaaaaaaaagaagagcacagagaagacaaagtgattccagttactcggtcattgagggctagaaacatcgttcaaagtacagaacacttacatgaagataatggtgatgttgaagtgcgtcgaagttgtaggattagaagtcgttatagtggtgtaaaccagtccatgctgtttgacaaacttataactaacactgctgaagctgtacttcaaaaaatggatgacatgaagaagatgcgtagacagcgaatgagagaacttgaagacttgggagtgtttaatgaaacagaagaaagcaatcttaatatgtacacaagaggaaaacagaaagatattcaaagaactgatgaagaaacaactgataatcaagaaggcagtgtggagtcatctgaagagggtgaagaccaagaacatgaagatgatggtgaagatgaagatgatgaagatgatgatgatgatgacgatgatgatgatgatgatgatgatgaagatgatgaagatgaagaagatggagaagaagagaatcagaagcgatattatcttagacagagaaaagctactgtttactatcaggctccattggaaaaacctcgtcaccagagaaagcccaacatattttatagtggcccagcttctcctgcaagaccaagataccgattatcttccgcaggaccaagaagtccttactgtaaacgaatgaacaggcgaaggcatgcaatccacagtagtgactcgacttcatcttcctcctctgaagatgaacagcactttgagaggcggaggaaaaggagtcgtaatagggctatcaataggtgcctcccactaaattttcggaaagatgaattaaaaggcatttataaagatcgaatgaaaattggagcaagccttgccgatgttgatccaatgcaactagattcttcagtacgatttgatagtgttggtggcctgtctaatcatatagcagctctaaaagagatggtggtgtttccattactttatccagaagtctttgaaaaatttaaaattcaacccccaagaggttgtttgttttatgggccacctggaactggaaagactctggttgccagagcacttgccaatgagtgcagtcaaggggataaaagagtagcatttttcatgaggaaaggtgctgattgtctaagtaaatgggtaggagaatctgaaagacagctacgattgctgtttgatcaggcctatcagatgcgcccatcaattattttttttgacgaaattgatggtctggctccagtacggtcaagcaggcaagatcagattcacagttctattgtttccaccctgctagctcttatggatggattggacagcagaggggaaattgtggtcattggtgctacgaacaggctagattctatagatcctgctttacgaaggcctggtcgctttgatagagaattcctctttagcctgcctgataaagaggctcgaaaagagattctaaagattcacaccagggattggaatcccaaaccactggacacatttttagaagagctagcagaaaactgtgttggatactgtggagcagatattaaatcaatatgtgctgaagctgctttatgtgctttacgacgacgctacccacagatctataccactagtgagaaactgcagttggatctctcttcaattaatatctcagctaaggatttcgaggtagctatgcaaaagatgataccagcctcccaaagagctgtgacatcacctgggcaggcactgtccaccgttgtgaaaccactcctgcaaaacactgttgacaagattttagaagccctgcagagagtatttccacatgcagaattcagaacaaataaaacattagactcagatatttcttgtcctctgctagaaagtgacttggcttacagtgatgatgatgttccatcagtttatgaaaatggactttctcagaaatcttctcataaggcaaaagacaattttaattttcttcatttgaatagaaatgcttgttaccaacctatgtcttttcgaccaagaatattgatagtaggagaaccaggatttgggcaaggttctcacttggcaccagctgtcattcatgctttggaaaagtttactgtatatacattagacattcctgttctttttggagttagtactacatcccctgaagaaacatgtgcccaggtgattcgtgaagctaagagaacagcaccaagtatagtgtatgttcctcatatccacgtgtggtgggaaatagttggaccgacacttaaagccacatttaccacattattacagaatattccttcatttgctccagttttactacttgcaacttctgacaaaccccattccgctttgccagaagaggtgcaagaattgtttatccgtgattatggagagatttttaatgtccagttaccggataaagaagaacggacaaaattttttgaagatttaattctaaaacaagctgctaagcctcctatatcaaaaaagaaagcagttttgcaggctttggaggtactcccagtagcaccaccacctgagccaagatcactgacagcagaagaagtgaaacgactagaagaacaagaagaagatacatttagagaactgaggattttcttaagaaatgttacacataggcttgctattgacaagcgattccgagtgtttactaagcctgttgaccctgatgaggttcctgattatgtcactgtaataaagcaaccaatggacctttcatctgtaatcagtaaaattgatctacacaagtatctgactgtgaaagactatttgagagatattgatctaatctgtagtaatgccttagaatacaatccagatagagatcctggagatcgtcttattaggcatagagcctgtgctttaagagatactgcctatgccataattaaagaagaacttgatgaagactttgagcagctctgtgaagaaattcaggaatctagaaagaaaagaggttgtagctcctccaaatatgccccgtcttactaccatgtgatgccaaagcaaaattccactcttgttggtgataaaagatcagacccagagcagaatgaaaagctaaagacaccgagtactcctgtggcttgcagcactcctgctcagttgaagaggaaaattcgcaaaaagtcaaactggtacttaggcaccataaaaaagcgaaggaagatttcacaggcaaaggatgatagccagaatgccatagatcacaaaattgagagtgatacagaggaaactcaagacacaagtgtagatcataatgagaccggaaacacaggagagtcttcggtggaagaaaatgaaaaacagcaaaatgcctctgaaagcaaactggaattgagaaataattcaaatacttgtaatatagagaatgagcttgaagactctaggaagactacagcatgtacagaattgagagacaagattgcttgtaatggagatgcttctagctctcagataatacatatttctgatgaaaatgaaggaaaagaaatgtgtgttctgcgaatgactcgagctagacgttcccaggtagaacagcagcagctcatcactgttgaaaaggctttggcaattctttctcagcctacaccctcacttgttgtggatcatgagcgattaaaaaatcttttgaagactgttgttaaaaaaagtcaaaactacaacatatttcagttggaaaatttgtatgcagtaatcagccaatgtatttatcggcatcgcaaggaccatgataaaacatcacttattcagaaaatggagcaagaggtagaaaacttcagttgttccagatgatgatgtcatggtatcgagtattctttatattcagttcctatttaagtcatttttgtcatgtccgcctaattgatgtagtatgaaaccctgcatctttaaggaaaagattaaaatagtaaaataaaagtatttaaactttcctgatatttatgtacatattaagataaatgtcatgtgtaagataactgataaatattggaactttgctagaacaagaccctgtagtaatagtaataatagttgaagtttggccaactcttaataaagttattttggtaactaatgttttatggcacttaagaataattagcagcgttaaattttgtttgtattaagcacttttaattttatccttcctaaaaatagtttattgtatctgacaagaaacttacttaaccattgtgtccttcccatcttttttgtcatctttgttttcttcaaatgccctcctcccatctgccttgagattcccttgtcttcacttaaaagccagagtgcaagtcatgatttgcgggagggctcttgaaccacttctggctgcaccacaattctgtacttgagtatcacagtcattgtttttgagacaaacatttttataattctaatttgggttaataaagattttaaatatttaaaaaaaaaaaaaaaaaaaa

SEQ ID NO: 51 - DNA, 4183 bp, human
atgagaccacagtcataagagtaaaacaaaaattctgatggaaataaatgcttatttggtaggaagcaaaaagcacaaaaacaagattgtctttctttttctttttctttttaaatgagaaggatccacccttgtgggaaaggaactctcaaaagacagcagtgggcctgacatcttgggcactttccaggttcttgggaggaagggagaaaagaagcagagagagagaagaaatatctactatttttatatacggtgtattcctctcatatcttaaagaaaagctttatgtagaaaaaaagattcatgacgcagcttatgtaagaataaacttgtggaatggaattagttgcagggaggaggtctgatttcgttcagttctcacagtgatctagtgtctgacttttctagggaatccaatcaataaaattgaagactggctgcaggattgcggatactctgaagaaggattttctgaggaagcaggacagtttatctacaatggcttctgcagccatgggaccagctttgaagatgacttgaccctgggagcggaggccacactactggccgccaatggcaaactcttctccaggagtttcctcgagacagccaggccttgccagctacttgatcttggctgtagtttggcttccagcagcatgactggggggaccaacaagactagttcaagcatctcagaaattctggacaaagtgcaagaagatgcagaagatgtcctcttcagtctgggctttggccaagaggatcacaaagacacttctcggatacccgcccgatttttcaccaccccctctcaggccaagggcattgatttccagctcttcctgaagtcccaggtgcggaggattgaaatggaagacccctgcctcatgctggccagcaggtttaagcaggtgcaaacactggctgtcactgctgatgccttcttctgtctctactcctatgtgtctaagacacctgtccaaaagttcacaccatcccacatgttctggaattgcaaccatccaactgatgtgccatccatcaggattctgtcccgagagcctgaaccccagtcacccagagaccgccttcggaaagccatctccaagatgtgtctgtacacatgcccccgagaccggccaccaccaccccacaacacccccaaaaggaacagtttggaccaagttgtgttggaagtgatggacaaagtgaaagaagagaagcagttcctccagcaagactctgatttggggcaattctcacaggaagatcctgtgccccctgctgagggtaagaagttgcccacttctccctatccatgtgtcttctgctgtgaagaggaaacacagcagaggatgtccacagtgctagcaccatcccaaactctggattcgaaccccaaggtaccctgttgcacacattctctgcccatagaagatccacagtggagcacagacccagctcagataaggagagagctgtgtagtctaccagccaccaatacggaaacccatccagccaaggatgagactttctggaaaagaaagagcagagcaagaaagagcctcttccagaagaatctcatgggcaggaaggttaagtccttggacctgtccatcacccagcagaaatggaagcagagtgtagacagaccagaactgcgtcggtctttaagccagcagccacaggacacttttgacttggaggaggtgcaaagcaacagtgaggaggagcagagtcagagtcgctggcccagcagacccaggcacccccaccaccaccagacttttgctggcaaagactcgtgaagctttctccaccaccacaacagcatgtggtctgacagaattggcttcaaagaagaaactaaaagccacctcttgcaggaaactgcactgccctcaacatccagcccctactccttggtcctccaaacccccaaactctgcaggagaaaggcagcatggtacatggggaggaagaccagactgagcgatttggaatccacatcctaatgctgccacaagctgcatgcacaaagaccttaggcacatctcttcatttctctgtacactggtttctctactatgtgtgtattaaaatatataatgtggatgatagtaaactgaacaaagccttaattttctcccaagctttgacattgccaagggcagttaggagacttcaggatcaagtttaggggacaagtttttttctaatactttcaaaaggcccaagtgaagagaggaaggacacctcactttctggctctaaaagcatggtacatctcacactaggattccctctgcacctctgttcatccctgtattcctaactaaattccagaaaatcttccacaacactggagtcctatttttcttcttgagacctcctttgaagaaatcaacttggagactcctccttaaatccagtttctttctctacccaaaattttgcatctttatagaaaaagagataagtaggattcagagtctcttctcctagccattgtggggggaaaaaatgctatttctgttggcagaaaacaatacaaatattttttttaaatcatggcatgtttttaaagttaactaacagctgtagtttgctttggaagttaaatgttttgtcaataaacagggcttgagcacatgcagtgctctcttaagcagtatgtggtttcagagcatcttggacacatttctcccctgagaaaatattagtattaatagaatgggagaagtaagatgcacgcatttccagaagtatattatttggctgcctaataaattgtgagacaaaagaaaaaaaaaaaacaggaagagagggacttgagggaatttgagggaaatcataaccaaaagtttaaaggaaaaaattacaccagacatgataaacagaagttgattttgttctggtgctattgccagcattaggggagaaggcacaaactgagtctgatacgtagtgaggcagagacaaaagggctagggtggaaaaatttttaaaccatctgtgtttactaattccccataccaaaagaacaaaatgaactttctcctatttcatgataaaagatagtttcacaatttggaaaaagccccccactccaagtttcctacccttcccacccacagaaaccaggagacaggggaactatcttccttgatgttaacatttcaaagaggtggttctcaggtcctagagaaagatattcctgagttgtaaaactgggaagaggctggaagaagatttagatctcaagaaatagaaagaactacagcaaattttctaaagcaaatattcttaagggaggtcaagggcctgaagtcaggaagaaacctatttggtcaagctgaggggaaagttaaggctatcttgtcacaagagaacagaaatatctgacaatatttcatttaaagaactgtattagtccattctcacactgctataaataaatacctgagactgggtaatttatacagaaaagaggtttaattggctcacagttccgcaggctgtacaggaagcatggcaacatcagtttctggggaggcctcagggagctttaactcatggtggaaagcaaagtgggagcaggcatcttacctggtatgagcaggaggaacaaaggaaaggggaggtgctaacacttttaaatgaccagatcttgtaagaactcactcattatacagtaccaaggggagatggtgctaaacgattaatgaaaactctacccagtaatccaatcaccacccaccaggccccacctccaacaatggggattacagtttgacatgagatttgggtgaggacacagatccaaactgtcaggcctctgagcccaagctaagccatcatatcccctgtgacctgcatgtatacatccagatggcctgaagcaagtggagaatcacaaaagaagtgaaaatggcctgttgctgccttaacagatgacattactttgtgaaattccttcttctggctcagaagctcccccactgagcaccttgtgacccccacccctgcctgccagagaataatcccctttgactgtaattttccactacctacctaaatcctataaaacagccccacccctatctccctttgctgactctctttttggactcagcctgcctgcacccaggtgattaaaaagctttattgctcacac

SEQ ID NO: 52 - DNA, 2505 bp, human
gctgagcgccggaggagcgtaggcagggcagcgctggcgccagcggcgacaggagccgcgcgaccggcaaaaatacacgggaggccgtcgccgaaaagagtccgcggtcctctctcgtaaacacactctcctccaccggcgcctccccctccgctctgcgcgccgcccggctgggcgcccgaggccgctccgactgctatgtgaccgcgaggctgcgggaggaaggggacagggaagaagaggctctcccgcgggagcccttgaggaccaagtttgcggccacttctgcaggcgtcccttcttagctctcgcctgcccctttctgcagcctaggcggcccaggttctcttctcttcctcgcgcgcccagccgcctcggttcccggcgaccatggtgacgatggaggagctgcgggagatggactgcagtgtgctcaaaaggctgatgaaccgggacgagaatggcggcggcgcgggcggcagcggcagccacggcaccctggggctgccgagcggcggcaagtgcctgctgctggactgcagaccgttcctggcgcacagcgcgggctacatcctaggttcggtcaacgtgcgctgtaacaccatcgtgcggcggcgggctaagggctccgtgagcctggagcagatcctgcccgccgaggaggaggtacgcgcccgcttgcgctccggcctctactcggcggtcatcgtctacgacgagcgcagcccgcgcgccgagagcctccgcgaggacagcaccgtgtcgctggtggtgcaggcgctgcgccgcaacgccgagcgcaccgacatctgcctgctcaaaggcggctatgagaggttttcctccgagtacccagaattctgttctaaaaccaaggccctggcagccatcccacccccggttccccccagcgccacagagcccttggacctgggctgcagctcctgtgggaccccactacacgaccaggggggtcctgtggagatccttcccttcctctacctcggcagtgcctaccatgctgcccggagagacatgctggacgccctgggcatcacggctctgttgaatgtctcctcggactgcccaaaccactttgaaggacactatcagtacaagtgcatcccagtggaagataaccacaaggccgacatcagctcctggttcatggaagccatagagtacatcgatgccgtgaaggactgccgtgggcgcgtgctggtgcactgccaggcgggcatctcgcggtcggccaccatctgcctggcctacctgatgatgaagaaacgggtgaggctggaggaggccttcgagttcgttaagcagcgccgcagcatcatctcgcccaacttcagcttcatggggcagctgctgcagttcgagtcccaggtgctggccacgtcctgtgctgcggaggctgctagcccctcgggacccctgcgggagcggggcaagacccccgccacccccacctcgcagttcgtcttcagctttccggtctccgtgggcgtgcactcggcccccagcagcctgccctacctgcacagccccatcaccacctctcccagctgttagagccgccctgggggccccagaaccagagctggctcccagcaagggtaggacgggccgcatgcggcagaaagttgggactgagcagctgggagcaggcgaccgagctccttccccatcatttctccttggccaacgacgaggccagccagaatggcaataaggactccgaatacataataaaagcaaacagaacactccaacttagagcaataaccggtgccgcagcagccagggaagaccttggtttggtttatgtgtcagtttcacttttccgatagaaatttcttacctcatttttttaagcagtaaggcttgaagtgatgaaacccacagatcctagcaaatgtgcccaaccagctttactaaagggggaggaagggagggcaaagggatgagaagacaagtttcccagaagtgcctggttctgggtacttgtccctttgttgtcgttgttgtagttaaaggaatttcatttttaaaagaaatcttcgaaggtgtggttttcatttctcagtcaccaacagatgaataattatgcttaataataaagtatttattaagactttcttcagagtatgaaagtacaaaaagtctagttacagtggatttagaatatatttatgttgatgtcaaacagctgagcaccgtagcatgcagatgtcaaggcagttaggaagtaaatggtgtcttgtagatatgtgcaaggtagcatgatgagcaacttgagtttgttgccactgagaagcaggcgggttgggtgggaggaggaagaaagggaagaattaggtttgaattgctttttaaaaaaaaaagaaaagaaaaagacagcatctcactatgttgccaaggctcatcttgagaagcaggcgggttgggtgggaggaggaagaaagggaagaattaggtttgaattgcttttttaaaaaaaaa

SEQ ID NO: 53 - DNA, 2204 bp, human
gagcggtgcggaggctctgctcggatcgaggtctgcagcgcagcttcgggagcatgagtgctgcagtgactgcagggaagctggcacgggcaccggccgaccctgggaaagccggggtccccggagttgcagctcccggagctccggcggcggctccaccggcgaaagagatcccggaggtcctagtggacccacgcagccggcggcgctatgtgcggggccgctttttgggcaagggcggctttgccaagtgcttcgagatctcggacgcggacaccaaggaggtgttcgcgggcaagattgtgcctaagtctctgctgctcaagccgcaccagagggagaagatgtccatggaaatatccattcaccgcagcctcgcccaccagcacgtcgtaggattccacggctttttcgaggacaacgacttcgtgttcgtggtgttggagctctgccgccggaggtctctcctggagctgcacaagaggaggaaagccctgactgagcctgaggcccgatactacctacggcaaattgtgcttggctgccagtacctgcaccgaaaccgagttattcatcgagacctcaagctgggcaaccttttcctgaatgaagatctggaggtgaaaataggggattttggactggcaaccaaagtcgaatatgacggggagaggaagaagaccctgtgtgggactcctaattacatagctcccgaggtgctgagcaagaaagggcacagtttcgaggtggatgtgtggtccattgggtgtatcatgtataccttgttagtgggcaaaccaccttttgagacttcttgcctaaaagagacctacctccggatcaagaagaatgaatacagtattcccaagcacatcaaccccgtggccgcctccctcatccagaagatgcttcagacagatcccactgcccgcccaaccattaacgagctgcttaatgacgagttctttacttctggctatatccctgcccgtctccccatcacctgcctgaccattccaccaaggttttcgattgctcccagcagcctggaccccagcaaccggaagcccctcacagtcctcaataaaggcttggagaaccccctgcctgagcgtccccgggaaaaagaagaaccagtggttcgagagacaggtgaggtggtcgactgccacctcagtgacatgctgcagcagctgcacagtgtcaatgcctccaagccctcggagcgtgggctggtcaggcaagaggaggctgaggatcctgcctgcatccccatcttctgggtcagcaagtgggtggactattcggacaagtacggccttgggtatcagctctgtgataacagcgtgggggtgctcttcaatgactcaacacgcctcatcctctacaatgatggtgacagcctgcagtacatagagcgtgacggcactgagtcctacctcaccgtgagttcccatcccaactccttgatgaagaagatcaccctccttaaatatttccgcaattacatgagcgagcacttgctgaaggcaggtgccaacatcacgccgcgcgaaggtgatgagctcgcccggctgccctacctacggacctggttccgcacccgcagcgccatcatcctgcacctcagcaacggcagcgtgcagatcaacttcttccaggatcacaccaagctcatcttgtgcccactgatggcagccgtgacctacatcgacgagaagcgggacttccgcacataccgcctgagtctcctggaggagtacggctgctgcaaggagctggccagccggctccgctacgcccgcactatggtggacaagctgctgagctcacgctcggccagcaaccgtctcaaggcctcctaatagctgccctcccctccggactggtgccctcctcactcccacctgcatctggggcccatactggttggctcccgcggtgccatgtctgcagtgtgccccccagccccggtggctgggcagagctgcatcatccttgcaggtgggggttgctgtgtaagttatttttgtacatgttcgggtgtgggttctacagccttgtccccctccccctcaaccccaccatatgaattgtacagaatatttctattgaattcggaactgtcctttccttggctttatgcacattaaacagatgtgaatattcaaaaaaaaaaaaaaaaaaaaaaaaaaaaaaaaaaa

SEQ ID NO: 54 - DNA, 2530 bp, human
aaaacaggagctgattcgagctggcagagctgggccatggaaccggtagagacctggacccccggaaaggtggcaacttggctgagaggtcttgacgactccctgcaggactatccctttgaggactggcagctgcctggcaagaacctgctccagctctgcccccaaagcctcgaggctctggctgtgcggtctctgggacaccaggagctcatcctgggcggggtggaacagctccaggccctgagctccaggctacagacagagaacctgcaaagcctgacagagggacttctgggggcaacccatgacttccagagcatagtccaaggctgcctgggggactgtgccaagacccctattgatgtcctctgtgcagctgtggagctgttgcatgaagctgacgccctcctcttctggctcagcaggtacctcttctcccacttaaatgatttctcagcatgccaggagatccgagacttgttggaggagctgagccaggtcttgcatgaggatggtccagcggctgagaaggagggcacagtcctgaggatctgcagccacgtggctgggatctgccacaacatcctggtctgctgccccaaggagctgctggaacagaaggccgtgctcgagcaggtgcagctggacagtccattgggcctagaaattcacaccaccagcaattgccagcactttgtgtcccaagtggacacccaggttcccactgactcccgactgcagatccagcctggagacgaggttgtccagatcaacgagcaggtggtggtgggatggccccgtaagaacatggtgagggaactgctgcgggagccagccggactcagcttagtgctgaagaagatcccgataccggagacccccccacagacgccccctcaggtcctggactccccgcaccagaggagcccatcactgtctctggccccactgtctcccagggccccatctgaagacgtctttgcctttgacctgtcttcaaaccccagtcccggacccagccctgcctggacagactctgcctcccttggccctgagcccctgcccatccccccggaacccccagccatactcccagcaggggtagcagggactccagggctccctgaatcccctgacaagagtcctgttggtcggaagaaatcaaaaggcctggcgacccggctgagccgccggcgggtgtcatgccgtgagctgggccggccggactgtgacggctggctcctgttgcgaaaggcaccgggcggcttcatgggcccgcgctggcgccgccgctggtttgtgctcaagggacacacgctctactggtaccgccagccccaggatgagaaggctgagggcctcatcaatgtctccaactatagtctggaaagtggacatgatcagaagaagaaatatgtgtttcagctcacccatgatgtgtacaaacccttcatcttcgctgctgataccctgacagatctgagcatgtgggtgcgtcatctcattacctgcatctccaagtaccagtctccaggccgggcccccccaccccgagaggaagactgctacagtgagaccgaagcagaggacccggacgatgaggctgggtcccactcagcctcgcccagccctgctcaagctgggagtcccctccatggagacacatcacctgcagccacccccacacagcgcagcccacggacctcctttggctctctgacagacagcagtgaagaggcactggaaggaatggtacgggggctgaggcagggtggcgtgtccctcctaggccagccacagcccctgacccaggaacagtggcggagctctttcatgcggcgcaaccgagaccctcagctcaatgagcgagtgcaccgtgtgcgggcgctacagagcacactcaaggcaaagctgcaggagctgcaggtcctagaagaagtgctgggtgaccctgagctgacaggagagaagttccgccagtggaaggagcagaaccgggagctgtactcagagggcctgggggcctggggagtggcacaggctgaaggcagctcccacatcttgacctctgactccacagaacagtcccccaactccctgccctctgaccctgaagagcactcccatctctgccccctgacctcagagagcagcctccgacctcctgacctctgaccctggccagcactctagctcctgacctttgacccgagggccacctcaaccccagcttctgacgtgtccaggacagagcatccctggattctgttcagggtgggaagtagtactgctagtcatggtctcaccccgagctgacccctctgcctgggctttgtgccaccctctcccttgccaaagaagaaactctccccccaaatcctccaacctctggggccacagccctgcccctccagttccttggcagttctcccccaaaccaggtctgtacaggtgttctttattttacatgagggctactttccaaccaaataaagtcaatttttctaagaaaaaaaaaaaaaaaaaa

SEQ ID NO: 55 - DNA, 374 bp, human
atgtctggccgtggtaaaggtggaaaaggtttgggtaagggaggagctaagcgtcatcgcaaggttttgcgcgataacatccagggcatcactaagccagctatccggcgccttgctcgtcgcggcggtgtcaagcgaatttctggccttatctatgaggagactcgtggtgttctgaaggtgttcctggagaacgtgattcgtgacgctgtcacttacacagagcacgccaaacgcaagaccgtgacagcaatggatgtggtctacgcgctgaagcgacagggacgcactctttacggcttcggtggctaaggctcctgcttgctgcactcttattttcattttcaaccaaaggcccttttcagggccgccca

SEQ ID NO: 56 - DNA, 2265 bp, human
agtcctgcgatttcgggtgtagagggagcaggggcctgcggggacctggtgtgggtggagtggggacaagcggtggagaagggtacgccagggtcgctgagagactctgttctccctggagggactggttgccatgagagcagccgtctgaggggacgcagcctgcactacgcgccccaagaggctgtgcgtggcgagcaggtcacgtgacgggagcgcgggctttggaaggcggctgaacgtcaggccacccgccgctaagctgagaagggagagcgagcttaggaccgcctgcccggggcaaccccgaaccaagctttagccgccgaggccgcgtgtcccaaaggccagtcatccctcctctgtgttgccatgggaattcaaggcctggccaaactaattgctgatgtggcccccagtgccatccgggagaatgacatcaagagctactttggccgtaaggtggccattgatgcctctatgagcatttatcagttcctgattgctgttcgccagggtggggatgtgctgcagaatgaggagggtgagaccaccagccacctgatgggcatgttctaccgcaccattcgcatgatggagaacggcatcaagcccgtgtatgtctttgatggcaagccgccacagctcaagtcaggcgagctggccaaacgcagtgagcggcgggctgaggcagagaagcagctgcagcaggctcaggctgctggggccgagcaggaggtggaaaaattcactaagcggctggtgaaggtcactaagcagcacaatgatgagtgcaaacatctgctgagcctcatgggcatcccttatcttgatgcacccagtgaggcagaggccagctgtgctgccctggtgaaggctggcaaagtctatgctgcggctaccgaggacatggactgcctcaccttcggcagccctgtgctaatgcgacacctgactgccagtgaagccaaaaagctgccaatccaggaattccacctgagccggattctgcaggagctgggcctgaaccaggaacagtttgtggatctgtgcatcctgctaggcagtgactactgtgagagtatccggggtattgggcccaagcgggctgtggacctcatccagaagcacaagagcatcgaggagatcgtgcggcgacttgaccccaacaagtaccctgtgccagaaaattggctccacaaggaggctcaccagctcttcttggaacctgaggtgctggacccagagtctgtggagctgaagtggagcgagccaaatgaagaagagctgatcaagttcatgtgtggtgaaaagcagttctctgaggagcgaatccgcagtggggtcaagaggctgagtaagagccgccaaggcagcacccagggccgcctggatgatttcttcaaggtgaccggctcactctcttcagctaagcgcaaggagccagaacccaagggatccactaagaagaaggcaaagactggggcagcagggaagtttaaaaggggaaaataaatgtgtttccccattatacctccttcaccccagaatatttgccgtcttgtacccttaagagctacagctagagaaaccttcacggggtggagagaggattctaaggcttttctagcgtgacccttttcagtagtgctagtcccttttttacttgatcttaatggcaagaaggccacagaggtacttttccttttttagctcaggaaaatatgtcaggctcaaaccacttctcaggcagtttaatggacactaagtccattgttacatgaaagtgatagatagcaacaagttttggagaagagagagggagataaaagggggagacaaaagatgtacagaaatgatttcctggctggccaactggtggccagtgggaggtgatggtggacctagactgtgcttttctgtcttgttcagccttgacccaccttgagagagagccaccaggaaggcgcatcttagcagatgggaggaactgctgagagaagatgggcagaaagctggagcccctggagttggctgtgtctgtgtttgtgactgattactggctgtgtcttgggtgggcagaaactcgaacttgctatgtaatttgtgtctagttattcagaggagtaagatggtgatgttcacctggcaatcagctgagttgagactttggaataagacactggttttcatgcgctgtttttgttttaaagttatgaagaaaaaagtcaataaaattctaaaagtaaaaaaaaaaaaaaaaaa

SEQ ID NO: 57 - DNA, 808 bp, human
gccggaagtgacgcagggcagcggcgtcgcgggggcggggctcgggaaagacccgtgccagcgggcgtgtggccgcgggtttcgcacggtccaataagggagggcggcgtggcccggcctggtagcgacgaggacgcgcctgcgcagaggcggcagcaccaccggggttgactccgggggcgcggcgaggagagacatgaggctgagctggttccgggtcctgacagtactgtccatctgcctgagcgccgtggccacggccacgggggccgagggcaaaaggaagctgcagatcggggtcaagaagcgggtggaccactgtcccatcaaatcgcgcaaaggggatgtcctgcacatgcactacacggggaagctggaagatgggacagagtttgacagcagcctgccccagaaccagccctttgtcttctcccttggcacaggccaggtcatcaagggctgggaccaggggctgctggggatgtgtgagggggaaaagcgcaagctggtgatcccatccgagctagggtatggagagcggggagctcccccaaagattccaggcggtgcaaccctggtgttcgaggtggagctgctcaaaatagagcgacgaactgagctgtaaccagactggggaggggcagggggagaggcccccatcagggaccagactgttccaaaaaaaaaacaaaaaacaaaaacaaacaaaaaaacacttaaaagcccaaggagtaagcctgtgtgtttgtgggccctgagagactcagagacctcagctccagcataccccaccaccttctcctttccc

SEQ ID NO: 58 - DNA, 1782 bp, human
acacggtctttgagctgagtcgaggtggaccctttgaacgcagtcgccctacagccgctgattccccccgcatcgcctcccgtggaagcccaggcccgcttcgcagctttctccctttgtctcataaccatgtccaccaacgagaatgctaatacaccagctgcccgtcttcacagattcaagaacaagggaaaagacagtacagaaatgaggcgtcgcagaatagaggtcaatgtggagctgaggaaagctaagaaggatgaccagatgctgaagaggagaaatgtaagctcatttcctgatgatgctacttctccgctgcaggaaaaccgcaacaaccagggcactgtaaattggtctgttgatgacattgtcaaaggcataaatagcagcaatgtggaaaatcagctccaagctactcaagctgccaggaaactactttccagagaaaaacagccccccatagacaacataatccgggctggtttgattccgaaatttgtgtccttcttgggcagaactgattgtagtcccattcagtttgaatctgcttgggcactcactaacattgcttctgggacatcagaacaaaccaaggttgtggtagatggaggtgccatcccagcattcatttctctgttggcatctccccatgctcacatcagtgaacaagctgtctgggctctaggaaacattgcaggtgatggctcagtgttccgagacttggttattaagtacggtgcagttgacccactgttggctctccttgcagttcctgatatgtcatctttagcatgtggctacttacgtaatcttacctggacactttctaatctttgccgcaacaagaatcctgcacccccgatagatgctgttgagcagattcttcctaccttagttcggctcctgcatcatgatgatccagaagtattagcagatacctgctgggctatttcctaccttactgatggtccaaatgaacgaattggcatggtggtgaaaacaggagttgtgccccaacttgtgaagcttctaggagcttctgaattgccaattgtgactcctgccctaagagccatagggaatattgtcactggtacagatgaacagactcaggttgtgattgatgcaggagcactcgccgtctttcccagcctgctcaccaaccccaaaactaacattcagaaggaagctacgtggacaatgtcaaacatcacagccggccgccaggaccagatacagcaagttgtgaatcatggattagtcccattccttgtcagcgttctctctaaggcagattttaagacacaaaaggaagctgtgtgggccgtgaccaactataccagtggtggaacagttgaacagattgtgtaccttgttcactgtggcataatagaaccgttgatgaacctcttaactgcaaaagataccaagattattctggttatcctggatgccatttcaaatatctttcaggctgctgagaacctaggtgaaactgagaaacttagtataatgattgaagaatgtggaggcttagacaaaattgaagctctacaaaaccatgaaaatgagtctgtgtataaggcttcgttaagcttaattgagaagtatttctctgtagaggaagaggaagatcaaaacgttgtaccagaaactacctctgaaggctacactttccaagttcaggatggggctcctgggacctttaacttttagatcatgtagctgagacataaatttgttgtgtgcaaaaaaaaaaaaaaaaaaaaaaaaaaaaaa

SEQ ID NO: 59 - DNA, 2258 bp, human
cccgggaaggcaggcgcgcgggttagaacgcgccagaggtcggcgcgcgcacacccgcaccgccccgaacccaggtagtgaggccagtgattccgagtgtgtgaggagcggcagtggcggcggaggagggggcggcgtgggtgggggcgggggcgggatgcgctccccggcccctctagccccgtggtggtacaacgcgaaggtgtgggaaggccgcgataaaccggaactgcagcccgccggacacctccggcttcacttccgtaagaggagaggagtgtacggcaaggggcgggaactggaacttggcccgcctcgttgtgagctgagctcagcggcacgcttttgtggcgtcactgcactgttaccccgccctacgtgtctctgacgctgacaccttctcactgtgaaacgtcgcgacctgtgacgtctggggggcgcctcaaatcttccactccagcatcggatcccggaaaggcagcgtcggagactggacccaaaactcttcctgttctgcctgcagagttgagccccgtccgggtcctggacccgcgtagtactgaccctggatccctgttcactgcgttctcgctccccgcgctccctgctggaccccgggatgccgggcatctccgcccgaggcctctctcatgaggggaggaagcagctagctgttaacctcacccgtgtcctggcactctaccgttccatcttggatgcctacatcatcgaatttttcacagacaacctatgggacacactcccttgctcatggcaggaagcattggatggactgaaaccaccacagctggccacaatgctgctggggatgcctggggaaggggaggtcgtcaggtacaggtcagtgtggccactcaccctgctggccctgaagtccacggcgtgtgccctggcctttacccggatgcctggctttcagaccccctcagaattcctggagaaccccagccagagctcccgactaacagctccattccggaaacatgtcaggcccaagaagcagcatgagatccggaggctgggagagttggtgaagaagctgagtgatttcacaggctgcacccaggttgtagacgtgggctcaggccagggccatctctcccgcttcatggctcttggcctggggttgatggtgaagagcatcgaaggggatcagagactggtggagagagcccagcgcctggaccaggagcttctgcaggctctggagaaagaggagaagaggaacccgcaggtggtccaaaccagccctcgtcactccccacaccacgtggttaggtgggtagaccccacagccctgtgtgaggagcttctgcttccactggagaacccgtgtcagggcagggcccgcttgctgctcacaggcctccacgcctgtggggatctgagtgttgccttgctgagacacttctcctgctgtcctgaggtggtggccctggcctcagtgggctgctgctacatgaagctgagtgaccctggcggctacccactgagtcagtgggtggctgggctgcctggctatgaactgccctaccggcttcgggagggggcctgccatgccctggaggaatatgctgagcggctacagaaagctggccctggccttcgaactcactgctaccgtgcagcactggagacagtcatccgacgggcccggcccgagctccgtcggccaggcgtgcagggtatccccagggtccacgagctcaagattgaagaatatgtgcagcgggggctacagcgagtggggctagatccccagctgccactgaatctggctgcccttcaggcccacctggcccaggagaaccgtgtggtggccttcttcagcctggctctactgcttgccccactggtggagacgcttattctactggaccggctgctgtaccttcaggaacagcttttccatgctgagctcctgcccatcttcagtcctgaactctctcccagaaacctggttctggtggccaccaagatgcccctgggtcaggctctttctgttctggagactgaagacagctgatgcagcctgaggagacatctcagaccccatcatctgaaagtgcccagagagcacagtggcagagtacatctcatccagagaaacagcaccctgcatcctccagagtcctggttccttcagtttcatcccctttctctccttccatggattatgtaatacattgtaaagttttaattaattaaaaattggatatctgaaaaaaaaaaaaaaa

SEQ ID NO: 60 - DNA, 2118 bp, human
aaaaaaaagaaaccaggcggcgcgttcccggtggcggcgccctggactcccgggcccgcgcatccccgccagccttccttaaggcggatgggtggcccccgagaccccgtcggacccatggtttccagtgcagcgcggagtgggcggtgccagcgtgccaggagccatgtctgaccaggacgtttggaagatcatatccatgccagaggctcttgtggggagatgagttggtaaagagagaggctgggatgaagatgctgccaggagtggacgtgtttgggactggcagctccgcccgagttctggtcccactgctgagggcagaagggttcactgttgaggccctgtgggggaagactgaggaggaggcgaagcagcttgctgaggagatgaacatcgccttctacaccagccggactgatgacatcttgctgcatcaagatgtggatctggtgtgcatcagcatcccccctccactcacccggcagatatccgtgaaggctctaggtattgggaagaatgtggtttgcgagaaggcagcaacatcggtggatgccttccggatggtgacagcctcgcgctactacccgcagctcatgagcctggtagggaacgtgctgcgcttcctgcctgccttcgtgcgcatgaaacagctgatttcggaacactatgtgggagcggtgatgatctgtgatgcccgcatctactcaggcagcctgctgagccccagctatggctggatctgtgatgagctcatgggcggcgggggcttgcacaccatggggacctacattgtggacctgctgacccacctgaccggccggagagccgagaaggtgcacgggctgctcaagacattcgtgaggcagaacgctgccatccgtggcatccggcacgtcactagcgatgacttctgtttcttccagatgctcatgggtgggggtgtgtgtagcacagtgacactcaacttcaacatgccaggcgcctttgtgcatgaagtcatggtggtaggctctgcaggacgcctcgtcgcccggggagccgacctctatgggcagaagaactctgccacgcaagaggagctgctcttgagggactcgctggcagtgggcgcaggactgcctgagcaggggccccaggatgtcccgctgctgtacctgaagggcatggtctacatggtgcaggccttgcgccagtccttccaggggcagggcgaccgccgcacctgggaccgcacccctgtctccatggccgcctccttcgaggatgggctgtacatgcagagcgtggtggatgccatcaagaggtcgagccgatccggggagtgggaggctgtggaggtgctgacggaggagcccgacaccaaccagaacctgtgtgaggcacttcagcggaacaacctatgagcctgcacctgggctccttgccacagggcagagggaccagggaggggaacaggagccagacatgacagggacttggccctagcagagacagtgtctttcatttgatgagtctgggtgaagccagaggtggctctgggacttcgccccctccagtggctcacctgctcctcagacttgcagggtggcaaatgttcctgttgccaggttaccacggtgtgcacagggcagagctgccgccaggcctcctcatggtgatgccagtgagtcggaccaggaaaggctcaccctggggagcccttcagcctgatccgcagtcctaacagggtgagaaagcacaagaggggccagctcggctgaggcctgaggagaaatgatgagaagttttgtttcgttcttgggctggggcatctcaggaacagtgagggcaacaagctgtccctcagggaccctcacctgccctcccatgtgaccaggcccttcccaggtggggactggggcttgctttattaagtgagctcttgggcttttgaagtaggacagagggccctggtttggcagagaggaggcaagggagggctttagaacatctgagaaatgttaataaataattcagaaaataaaaaaaaaaaaaaaaaaaaaaaaaaaaaaaaaaaaaaaaaaaaaaaaaaaaaaaaaaaaaaaaaaaaaaaaaaaaaaaaaaaaaaaaaaaaaa

SEQ ID NO: 61 - DNA, 3275 bp, human
ctgggaccctgaggcggccgtggttaggcggctccccggcggctcctccgcggcggtgacggcgaccgcactccccgcttcccgctccccgcgctcctccgcccgggtccgccagccgaggccgctcccgagcgtcggaagatgccggccgtgtccaagggggacgggatgcggggcctggcggtcttcatctcggatatccgcaactgtaaaagtaaagaagcagaaataaaaaggataaacaaggaactggcaaatatcagatcaaaatttaaaggtgacaaggctcttgatggctatagtaaaaaaaagtacgtctgcaagttgctcttcatctttctccttggtcatgacattgactttggacacatggaggctgtgaacctgctgagttcaaacagatacacggaaaagcagatcggctaccttttcatctctgtgttggtgaactcaaacagtgagctgatccgcctgatcaacaacgccatcaagaatgacctggccagccgcaaccccaccttcatgggcctggccctgcactgcatcgccagcgtgggcagccgggagatggccgaggccttcgccggggagatccctaaggtcctcgtagccggagacactatggacagcgtgaagcagagcgcggccctgtgcttgctgcgcctgtacaggacgtcccccgatcttgtccccatgggcgactggacatcccgagtggtgcacctgctcaatgaccagcacttgggtgtggtaactgcagccacaagtctgatcaccactttagcacagaagaacccagaagagtttaaaacctccgtgtctctggctgtctctaggctaagcagaatcgtgacgtctgcatccacagatctccaggattacacttactattttgtcccggctccctggctgtctgtcaaactgctgagactgctgcagtgctacccacccccagaccctgcagtgcgaggccgcctgactgagtgcctggagaccatcctgaacaaagcccaagaaccgcccaagtcgaagaaggtccagcactccaacgcgaagaatgccgtgctcttcgaggccatcagcttaatcattcaccatgacagtgagccgaacctgctcgtccgtgcctgcaaccagttgggccagtttctgcagcaccgcgagaccaacctgcgctacctggccctggagagcatgtgcacgctggccagctctgagttctcccatgaggctgtcaagacgcacatcgagacggtcatcaacgccctgaagactgagcgggacgtgagcgtgcggcagcgggccgtggacctcctctacgccatgtgcgaccgcagcaacgccccacagatcgtggccgagatgctgagctatctggagacagctgactactccatccgagaagagattgtgctgaaggtcgccatcctggctgagaagtacgcggtggactacacctggtatgtggataccatcttgaacttgatccgaattgctggtgattacgtgagtgaagaggtgtggtaccgagtcattcagatcgtcatcaaccgggacgacgtgcagggctacgcggccaagactgtgttcgaggctcttcaggctcccgcgtgccacgagaacctggtcaaagtgggcggctacatcctgggggagtttggaaacttgatagctggagacccgagatccagcccgctgatccagttccacctgctgcactccaagttccacctgtgcagcgtccccacccgcgcgctgctcctgtccacctacatcaagttcgtgaacctcttcccggaggtgaagcccaccatccaggacgtgctgcgcagcgacagccagctcaggaacgcagacgtggagctgcagcagcgtgctgtggagtacctgcggctcagcaccgtggccagcaccgacattctggcgaccgtgctggaggagatgcccccattcccggagcgggagtcctccatcttggcaaagctcaagaagaagaagggccccagcacggtgacagacctggaggacaccaagcgggacaggagtgtggacgtgaacgggggtcctgagcctgccccagccagtaccagcgccgtgtctacgccttctccgtcggcagacctgctgggtctcggggctgccccccctgcccccgcgggccccccaccctcctccggcggcagcgggctgctcgtggacgtgttctcagactcggcctctgtggtcgcgcctctcgctcctggctccgaagacaactttgccaggtttgtttgtaaaaacaatggtgtgttgtttgaaaaccagctgcttcaaattggacttaagtctgaatttcggcagaatttaggtcggatgtttatcttttatggtaataagacctccacgcagttcctaaactttaccccaacactaatctgttcagacgaccttcagcctaacctgaacctgcagaccaagcccgtggacccgaccgtggaggggggcgcgcaggtgcagcaggtggtcaacatagagtgcgtgtccgacttcacggaggcgccagtcctcaacattcagttcaggtatgggggcaccttccagaacgtgtctgtgcagctgcccatcactctcaacaaattcttccagccgacagaaatggcttctcaggatttctttcaacgttggaagcagttgagcaatccacagcaggaagtgcagaacatcttcaaagcaaagcacccaatggacacagaagtcaccaaagccaagatcattggatttggttctgcacttcttgaagaagttgatcctaatcctgcgaatttcgtgggagctggaatcatccacacgaaaaccacccagattggatgcctgctgcgcttggagccgaacctgcaagcccagatgtaccggctcacgctgcgcacaagtaaggaagccgtttctcagagattatgtgaattgctctcagcgcagttttagtcctgaggatggaagaccaggcttgtgtgtcttgtgttgtcttcgtctgtgccgtttgtcttcgtggccatcctgcagatgagcaccgtgtccagtgccacagcacaaggcgcctccccgccccgccgccccacacctctcccctttgggctggacgggaacacacgtgtgtggctcaggaggaaaagctcagcctggactgtggcagccacggcagaaggtggatcttgggatcaatttttataaaaatcgagacagttctgtggttaaatctacaaattaaagggaaattagaaaaaaaaaaaaaaaaaaaa

SEQ ID NO: 62 - DNA, 1482 bp, human
gttgacgtgttcgactttcctgataattctgatgtctcaagcattggcaggctgggtgaaaatgagaaagatgaagaaacttatgagacctttgatcctcctttacatagcacagctatatatgctgatgaagaagaattctccaaacattgtggactgtctctctcttcaactcctccaggaaaagaagcaaaaagaagttcagacacttctggaaatgaagcaagtgaaatcgaatctgtaaaaattagtgcaaaaaagccaggaagaaagctcaggcccattagtgatgactctgaaagcattgaagaaagtgatacaaggagaaaagttaaatcagcagagaaaataagtacacaacgtcatgaggttattcgaaccacagcgtcttcagaactttcagagaaaccagctgagtctgtcacttctaaaaagacaggaccccttagtgcccagccctctgttgaaaaagagaacttggcaatagaaagtcaatcgaaaactcagaaaaaagggaagatatctcatgacaaaaggaagaaatcaagaagtaaagccataggctcagatacttctgacattgtgcacatttggtgtccagaaggaatgaaaaccagtgacatcaaggagttgaatattgttttgcctgaatttgagaaaacccacctagagcatcaacaaagaatagaatctaaagtttgtaaggcagccatcgccacattttatgttaatgttaaagaacaattcatcaaaatgcttaaagaaagccagatgttgacaaatctgaaaaggaagaatgctaagatgatttcagatatcgaaaagaaaaggcagcgtatgattgaagtccaggatgaactgcttcggttagagccacagctgaaacaactacaaacaaaatatgatgaacttaaagagagaaagtcctcccttaggaatgcagcatatttcttatctaatttaaaacagctttatcaagattattcagatgttcaagctcaagaaccaaacgtaaaggaaacgtatgattcatccagccttccagctctgttatttaaagcaagaacacttctgggagccgaaagccatctgcgaaatatcaaccatcagttagagaagctccttgaccagggatgagaagagcagtctactaaaatgtgcctataggaagactagtctcatgctgttaccttctgaaactgtacctttataaatcaattgttttgcaaagaagttatggcctacttagaatctaaaatttgttattcaaattaaatggctgtgaacaatgttaaatagcatcagtttgtccaatagttttaaaggccataatcatcttttctggttaatatcttgagtaattttaaaatgttgacaccttaatcggtcccaggtatgagctataataaacttgtaaaattaaaaaaaaaaaaaaaaaaaaaaaaaaaaaaaaaaaaaaaaaaaaaaaaaaaaaaaaaaaaa

SEQ ID NO: 63 - DNA, 4696 bp, human
ggcagaccgtcacgtgacgacgtcgattcgcgtgcggcagtggcgaagttgacaaaccccgcgaaaatcgactctttgcatcgcacattttgttgattttccctcgtttttctttctctctttcccccgtccatccgaaagagggttggaaaaaaacaaaacaaacaaacaaacaaaaaaaaaacctaacgctgttgggacccggaagcggaaagggcatctttgaggtcgatacttccgggtcattgggagagtgcgggattcctgggccgagagcgggtggctgagccgggacctcgcgtgattctcggaacccgaggagaagcggcgtccggggctatggctgtgactctggacaaagacgcttattatcggcgagtgaagagactgtacagcaattggcggaaaggagaagatgagtatgccaacgttgatgccattgttgtatcagtgggtgttgatgaagaaattgtttatgccaaatcaactgccttacagacatggctctttggttatgaactaactgatactatcatggtcttttgtgatgacaaaatcatctttatggccagcaagaaaaaagtggagttcttgaaacagattgccaacactaagggcaatgagaatgctaatggagcccctgccatcacactgctaatacgagaaaagaatgaaagtaataagagtagctttgacaaaatgattgaagccattaaagaaagcaagaatggcaagaagattggagtgttcagcaaagacaaattccctggagagttcatgaagagctggaatgactgcctcaacaaagaaggctttgacaaaatagatatcagtgcagttgtggcatataccatcgctgtaaaggaggatggggagctcaacctaatgaagaaagcagccagcatcacttctgaagtcttcaacaaattcttcaaggaaagagtcatggaaatagttgatgcagatgagaaagttcgacacagcaaactggctgagtctgtggaaaaggccattgaagagaaaaaataccttgctggggcagacccttctactgtggaaatgtgttaccctcctatcattcagagtggtggcaactataatctcaagttcagtgtggtgagtgacaagaatcatatgcactttggggctatcacttgtgccatgggtattcgcttcaagtcttactgctccaaccttgttcgcactttgatggttgatccttctcaagaagttcaagaaaattataactttttgctccagcttcaagaggagctgctgaaggaattaagacatggtgtgaagatatgtgacgtgtataacgctgtcatggacgtggttaaaaagcagaagccagaactgctgaacaaaattaccaaaaacctagggtttgggatgggaattgaattccgtgaaggctccctagtaatcaatagcaaaaatcaatacaaactgaagaaaggaatggttttcagcatcaatttaggattctcagacctgactaacaaggaggggaaaaagccagaagagaaaacctatgccctgttcattggtgacacagtgcttgtggatgaggatggcccagctactgttctcacttctgtgaagaagaaagtgaagaatgtggggattttcctaaagaatgaagatgaggaagaagaggaggaggagaaagatgaggcagaggaccttttgggaagaggttctcgggcagcattacttacagaaagaacaagaaatgaaatgactgcagaagagaagcgaagagcacatcagaaagaactagcggctcaactcaatgaagaagcaaagaggcgattgactgaacaaaagggagaacagcagattcagaaagctcgcaagtctaatgtgtcctataaaaacccatctctgatgcctaaggaaccgcatattcgggaaatgaagatctacatcgataagaaatatgagactgtaataatgcccgtgtttggcattgcaacaccgtttcacattgccacaatcaagaatataagtatgtccgtggaaggagattatacttacttgcgaatcaacttttattgcccaggcagtgctctgggcaggaatgaaggcaacatctttcctaaccctgaagcgacttttgtcaaggaaattacataccgagcatcaaatattaaggcacccggagaacagacagtaccagccttgaaccttcagaatgctttccgaattattaaagaagtacagaaacgttataaaactcgagaagctgaagagaaagagaaggaggggattgtaaaacaagactcactggtgatcaatctaaaccggagtaatccgaaactgaaagatctatacattcgcccaaatattgcccaaaagaggatgcaaggctcactggaggcccatgtcaatggcttccgcttcacatctgttcgaggagacaaagtggatattttgtacaataatattaagcatgctttgttccagccctgtgatggagaaatgattattgtcttgcactttcacctcaagaatgccatcatgtttgggaagaagcggcacacggatgtgcagttctacacagaagtgggagagataaccacggacttggggaaacatcagcatatgcatgaccgagatgacctctatgctgagcagatggaacgagaaatgaggcacaaactgaaaacagcctttaaaaatttcattgagaaagtagaggctctaactaaggaggaactggaatttgaagtgccttttagggacttgggatttaacggagctccctataggagtacctgcctccttcagcccactagtagtgcgctggtaaatgctacggaatggccaccttttgtggtgacattggatgaggtagagctgatccactttgagcgggtccagtttcacctgaagaactttgatatggtaatcgtctacaaggactacagcaagaaagtgaccatgatcaacgccattcctgtagcctctcttgaccccatcaaggaatggttgaattcctgcgacctgaaatacacagaaggagtacagtccctcaactggactaaaatcatgaagaccattgttgatgaccctgagggcttcttcgaacaaggtggctggtctttcctggagcctgagggtgaggggagtgatgctgaagaaggggattcagagtctgaaattgaagatgagacttttaatccttcagaagatgactatgaagaggaagaggaggacagtgatgaagattattcatcagaagcagaagagtcagactattctaaggagtcattgggtagtgaagaagagagtggaaaggattgggatgaactggaggaagaagcccgaaaagcggaccgagaaagtcgttacgaggaagaagaagaacaaagtcgaagtatgagccggaagaggaaggcatctgtgcacagttcgggccgtggctctaaccgtggttccagacacagctctgcaccccccaagaaaaagaggaagtaacttctgaactttggccctgagctccattcttcctccagccaacccctgaaaattttacatgacatagaaactgtatttttcctttcgttttcatttgaagttttgccatttgtgtttatgggtttagggggccatttgtgtggaccaatctactcggggaattccaggcccaccaggacacgtgccaatggccccattcagatggcaagggaggaggtgttcttgaagacaggaggaggctcccgctgttaataaatattgtttcattcttctctcttcctgtcaccttctgccaagacattgatggcttctgacatcttatttggtgtctcaaagctgtatttccaagacagtggtacaaggtgacccttaattacccgtatcatggttcttgaccagcacattcaatcctccaacctaccctactgccatgaccttccgcacatctctaagttttatctttgcaatactcaaggttctcggaaatttgctaatggttgtgataaaccatacagcttgagccagtgaggcagattgggctggtgccttcgtctgagttttcctgctttcctgcctcgtgcagattctgaggtatatctgctgccttggaagacataagaagcagtgatactccctggctcggttattttctccatacaatgcacacatggtacaatgatagaaggcaaaattgccactgtcttcttttttttctcatatatctaaggaagatatatcaggttgtgcctcatgtaccgcttctagtgaaatgtagaggaaggctcaaaggagtcaacatttagatctggaagggacaagtcatgccttgggcctagaataccctgatgagaaaagagaagaggaagggaggccatatctacaacacagcctctcggcactgctgctccttattttaactttgtcttgcattgtcctgtatttatcacagtttctgttgaacagcttttcaagtatttggggagtttatcttgccatcctccccttctggttctctgcacccacctgtcccactgcagttccttccgtgctctgtgactttaagagaagaaggggggaggggtcccggattttatgtttgtttgttttttctccttagcagtaggacttgatattttcaattttggaagaactaaaagatgaataaactgggttttttttgttgtttgtttttgtaaaaaaaaaaaaaaaaaaa

SEQ ID NO: 64 - DNA, 1249 bp, human
ggcacgagccagggtttcctcttcaagtaggtctaaaacattttttttctcattgacttccttcctgttctaactgccagtactcagaagtcagagttgagagacagaggcaccccggacagagacgtgaagcactgaataaatagatcagaatgactgaaaaagccccagagccacatgtggaggaggatgacgatgatgagctggacagcaagctcaattataagcctccaccacagaagtccctgaaagagctgcaggaaatggacaaagatgatgagagtctaattaagtacaagaaaacgctgctgggagatggtcctgtggtgacagatccgaaagcccccaatgtcgttgtcacccggctcaccctggtttgtgagagtgccccgggaccaatcaccatggaccttactggagatctggaagccctcaaaaaggaaaccattgtgttaaaggaaggttctgaatatagagtcaaaattcacttcaaagtgaacagggatattgtgtcaggcctgaaatacgttcagcacacctacaggactggggtgaaagtggataaagcaacatttatggttggcagctatggacctcggcctgaggagtatgagttcctcactccagttgaggaggctcccaagggcatgctggcccgaggcacgtaccacaacaagtccttcttcaccgacgatgacaagcaagaccacctcagctgggagtggaacctgtcgattaagaaggagtggacagaatgaatgcatccaccccgttccccacccttgccacctggaagaattctctcaggcgtgttcagcaccctgtccctcctccctgtccacagctgggtccctcttcaacactgccacatttccttattgatcgatcttttcccaccctgtcactcaacgtggtccctagaacaagaggcttaaaaccgggctttcacccaacctgctccctctgatcctccatcagggccagatcttccacgtctccatctcagtacacaatcatttaatatttccctgtcttacccctattcaagcaactagaggccagaaaatgggcaaattatcactaacaggtctttgactcaggttccagtagttcattctaatgcctagattcttttgtggttgttgctggcccaatgagtccctagtcacatcccctgccagagggagttcttcttttgtgagagacactgtaaacgacacaagagaacaagaataaaacaataactgtg

SEQ ID NO: 65 - DNA, 1545 bp, human
gaagacaccaccggaagcaaggaaggtgctgtgtaatcattaaggagcggaggcttttggagctgctaaaatgccggattacctcggtgccgatcagcggaagaccaaagaggatgagaaggacgacaagcccatccgagctctggatgagggggatattgccttgttgaaaacttatggtcagagcacttactctaggcagatcaagcaagttgaagatgacattcagcaacttctcaagaaaattaatgagctcactggtattaaagaatctgacactggcctggccccaccagcactctgggatttggctgcagataagcagacactccagagtgaacagcctttacaggttgccaggtgtacaaagataatcaatgctgattcggaggacccaaaatacattatcaacgtaaagcagtttgccaagtttgtggtggaccttagtgatcaggtggcacctactgacattgaagaagggatgagagtgggcgtggatagaaataaatatcaaattcacattccattgcctcctaagattgacccaacagttaccatgatgcaggtggaagagaaacctgatgtcacatacagtgatgttggtggctgtaaggaacagattgagaaactgcgagaagtagttgaaaccccattacttcatccagagaggtttgtgaaccttggcattgagcctcccaagggcgtgctgctctttggtccacccggtacaggcaagacactctgtgcgcgggcagttgctaatcggactgatgcgtgcttcattcgagttattggatctgagcttgtacagaaatacgtcggtgagggggctcgaatggttcgtgaactctttgaaatggccagaacaaaaaaagcctgccttatcttctttgatgaaattgatgctattggaggggctcgttttgatgatggtgctggaggtgacaatgaagtgcagagaacaatgttggaactgatcaatcagcttgatggttttgatcctcgaggcaatattaaagtgctgatggccactaacagacctgatactttggatccagcactgatgaggccagggagattggatagaaaaattgaatttagcttgcccgatctagagggtcggacccacatatttaagattcacgctcgttcaatgagtgttgaaagagatatcagatttgaactgttagcacgactgtgtccaaatagcactggtgctgagattagaagcgtctgcacagaggctggtatgtttgccatcagagcacggcgaaaaattgctaccgagaaggatttcttggaagctgtaaataaggtcattaagtcttatgccaaattcagtgctactcctcgttacatgacatacaactgaaccctgaaggctttcaagtgaaaactttaaattggaatcctaaccttatatagacttgttaataaccaattcataaacaaataaatggcttcaaaattgtatgcttttttccatatctcttcttgtaatataataaaaggtgatttctaatgttaaaaaaaaaaaaaaaaaaa

SEQ ID NO: 66 - DNA, 4421 bp, human
ggcagcgccaggcgtggggccggggcagcgccgggcgagggcgagggcgcgggcggaagttccaggagggccagaattccaagtgatttctgtcacccgccggcggaccgagagtctagggttcggggcgcgcaggctgcctcggcgcagacctcttcccctcagggaggccgtctcctgaccagacccactcctgcctcccacccgggtgccgtgtttagggttattttaggctgctcacctgacagattgtacacaagcccttaattgcccccctctgtttgaggtcgtggtgaggtttcatatttcgcagccacgctcaaattgtgccgtcatgttacagttgtaggtgatgaaataccggctgcttagacgcgggatcggtttttataccggggcaaacgctagtggtcccagaatgcagagttgggggcctcaaggaatccgggtgtgctgagataattggttaattgcttgattaaaattggggattaattttagagttcttccactcggagctcgcttctgtgctgaagatgctttgcaacgccttgaggaaaacgcgccaaagaagtttctgttagacttgagttacaagattgcagatttttcttgatttgctagtatgtttttttttacgttcgtagagttttataggtagatagataactttggttcgggtagttttccttttaaaatttgtagagaactgaaagtggctgatatgttagcttttttagggggacggggtcggggaatggagtctcagtctgttgcccaggctggagtgcagtggcgcgatctcggctcactgcaacctccgcctcccgggttcaagcgattctcctgcctcagcctcccgaatagctgggattacaggcgcccgccacggcgcccagtcagtatatcagtttttaaggtttgtgaagcgcgatttattttttcagaatgtcgtcttcctccacattgtgaggaaaattttcagaatacaaaaagttgaggccgggcgctgtggctcaagcctgtaatcccagcactttgggaggccgaggcgggtggatcatgaggtcaggaggatcatgaggatcaggtggatcatgaggatcaggaggtcagcctggccaatatggtgaaaccccgtctctactaaaaatacaaaattagccgggtgtggtggcgcgtgcttgtaatcccagctactcaggaggctgaggcaggagaatcccttgaacctgggaggcggaggttgcagtgagccaagatcacaccattgcactccagcctgggcgacagggtgagactgtgtctcaaaaaaaaaaaaaaaaagttgaaaggattctacagtggacatccatagatttattccaaattctaaagttgttaacagctcgttatactgcattctctttatcacatagtggttgttgaaaggtttgacaggaacactgatgcttcaataatggttttggttcagtttgttagtctgttgaacttcaggatcgtgtcttagaatatatgttcgaaaggataaaaaccgtactttaattttgggtttcaaaagcctacccctgcaacaaaatagaagctcaataagtgtgtcatcctcaaaatatccgtgggtcttttgtctttataatattctgacaccaaaagtgagagaagtagtagttgaattttatgatctgcattgttaaatgagggcttatcttccttaacaaataataacatcaagaacttaaacgaaaattgaacattctgactcgaccgagtggaatattggtgaacgatactaagttagatggacctatattacagattctattcatgaacaatgctatttcaaagcaatatcatcaagaaatagaggaatttgtatcaaatttagtaaaaagatttgaggaacagcagaaaaatgatgtggaaaagacttcctttaatcttttgccccagccatccagtattgtgctagaggaggaccacaaagtggaagagtcctgtgccattaaaaacaacaaggaagctttcagtgttgtaggaagtgtcctgtattttactaatttttgccttgataaattggggcaaccgcttctaaatgaaaaccctcagctttccgaaggatgggaaatacccaagtatcctacatagtgaatgaagatcttttatgcatcttgccactaagttcacctttaaaacaatttccaaattttgcagaccatgataactattccttaataaaattcactaaaggtaccatcaagtcttcagccacattgtttctctagaagggcaagaaatacaagtaaaggcaaaaaggccaaagcctcactgtttcaattgtggttctgaagaacaccaaatgaaagattgcccaatgcctcggaatgctgctcgaataagtgaaaagagaaaagagtatatggatgcctgtggagaagcaaacaatcagaatttccagcagcgataccacgcagaagaagtagaagaaagatttggaagattcaagccaggagttattagtgaggaacttcaagatgcactaggtgtgacagacaagagtcttccaccttttatctatcggatgcgccagctagggtacccaccagggtggctcaaagaggctgaattggagaattcggggcttgcactctatgatggaaaagatggcactgatggggaaacagaagttggagaaatacaacagaataaaagtgtcacttacgatctctcaaaattggtcaactatcctggttttaatatatctactcccagaggaattccagacgaatggaggatctttggttccataccaatgcaggcatgtcagcagaaggatgtgtttgccaattaccttacttctaacttccaagcgccaggtgtgaagtctggcaacaagaggtcttcatctcactctagcccaggtagtccaaagaagcagaagaatgaaagcaactcagcgggatctcccgccgacatggagctcgattcagatatggaggtaccacatggttctcagagcagcgaaagttttcagtttcaaccaccattacctcctgacactcctccactcccccggggaactcctccacccgtcttcacccctccactcccaaagggcaccccgccgctgactcccagtgactcaccccagaccagaacagcatctggagctgtggatgaggacgcactgactctagaagaacttgaagaacagcagaggcggatctgggcagctcttgagcaggccgagagcgtaaacagcgactccgacgttcctgtggacacacctttaactggcaattccgttgcctcatcaccttgtccaaatgagctagacctccctgtcccggagggaaaaacatctgaaaagcagacgctggatgagcctgaggtaccagagatttttacaaagaaatcagaagctggacatgcctccagtccagactctgaggtgacatcactttgtcagaaggaaaaagcagagttggctccggtaaacactgaaggtgcccttcttgataatggcagtgtcgtaccaaactgtgacatcagcaatgggggcagccagaagctctttcctgcagacaccagtccttcaacggccactaaaattcatagccctatacctgacatgagcaaatttgcaactggaatcacgccatttgaatttgagaatatggcagaatctactggaatgtacctcaggataagaagcttgttaaagaactcaccccgaaaccagcagaaaaacaaaaaggcctctgaataatggcttgacttagcactgagagctatttaataactttgttccgttaattagtactaattaagtggatagatagaatggttttcctgtttgtccctcccatgtttaaaaatctatccaaggttcatgttccaaagtcaagcctattttaaagaaagactgagctcactagttcagtatattttattctcactgacaaaacttggggggagatgtgaatatgacctggtttagagagggtttgttaaggtttatactatttttggattgtgactatccgtcgagagtgatggtttttatctgtcttttgtacattgttttccctttctacattttgctaattatcctgtatataagtttaatatatcactttttaaaagaaaaaattctaccattttaaattcatgtttcaactcctacaaccaaatgagaaaaatcagggatgagcagctttatcccatttggggtatttttgtaagtgatttacatgtgtcaattttagtaatacttttacttttttgtaacttcatccttcatatatgcttgctatacaggtatgttcatctttgtgtacagaggtttaataaattagttttcatataaaaaaaaaaaaaaaaaaaaaaaaaaaaaaaaaaaaaaaaaaaaaaaaaaaaaaaaa

SEQ ID NO: 67 - DNA, 2387 bp, human
cctcgtgccgcggaccccagcctctgccaggttcggtccgccatcctcgtcccgtcctccgccggcccctgccccgcgcccagggatcctccagctcctttcgcccgcgccctccgttcgctccggacaccatggacaagttttggtggcacgcagcctggggactctgcctcgtgccgctgagcctggcgcagatcgatttgaatataacctgccgctttgcaggtgtattccacgtggagaaaaatggtcgctacagcatctctcggacggaggccgctgacctctgcaaggctttcaatagcaccttgcccacaatggcccagatggagaaagctctgagcatcggatttgagacctgcaggtatgggttcatagaagggcatgtggtgattccccggatccaccccaactccatctgtgcagcaaacaacacaggggtgtacatcctcacatccaacacctcccagtatgacacatattgcttcaatgcttcagctccacctgaagaagattgtacatcagtcacagacctgcccaatgcctttgatggaccaattaccataactattgttaaccgtgatggcacccgctatgtccagaaaggagaatacagaacgaatcctgaagacatctaccccagcaaccctactgatgatgacgtgagcagcggctcctccagtgaaaggagcagcacttcaggaggttacatcttttacaccttttctactgtacaccccatcccagacgaagacagtccctggatcaccgacagcacagacagaatccctgctaccagtacgtcttcaaataccatctcagcaggctgggagccaaatgaagaaaatgaagatgaaagagacagacacctcagtttttctggatcaggcattgatgatgatgaagattttatctccagcaccatttcaaccacaccacgggcttttgaccacacaaaacagaaccaggactggacccagtggaacccaagccattcaaatccggaagtgctacttcagacaaccacaaggatgactgatgtagacagaaatggcaccactgcttatgaaggaaactggaacccagaagcacaccctcccctcattcaccatgagcatcatgaggaagaagagaccccacattctacaagcacaatccaggcaactcctagtagtacaacggaagaaacagctacccagaaggaacagtggtttggcaacagatggcatgagggatatcgccaaacacccagagaagactcccattcgacaacagggacagctgcagcctcagctcataccagccatccaatgcaaggaaggacaacaccaagcccagaggacagttcctggactgatttcttcaacccaatctcacaccccatgggacgaggtcatcaagcaggaagaaggatggatatggactccagtcatagtacaacgcttcagcctactgcaaatccaaacacaggtttggtggaagatttggacaggacaggacctctttcaatgacaacgcagcagagtaattctcagagcttctctacatcacatgaaggcttggaagaagataaagaccatccaacaacttctactctgacatcaagcaataggaatgatgtcacaggtggaagaagagacccaaatcattctgaaggctcaactactttactggaaggttatacctctcattacccacacacgaaggaaagcaggaccttcatcccagtgacctcagctaagactgggtcctttggagttactgcagttactgttggagattccaactctaatgtcaatcgttccttatcaggagaccaagacacattccaccccagtggggggtcccataccactcatggatctgaatcagatggacactcacatgggagtcaagaaggtggagcaaacacaacctctggtcctataaggacaccccaaattccagaatggctgatcatcttggcatccctcttggccttggctttgattcttgcagtttgcattgcagtcaacagtcgaagaaggtgtgggcagaagaaaaagctagtgatcaacagtggcaatggagctgtggaggacagaaagccaagtggactcaacggagaggccagcaagtctcaggaaatggtgcatttggtgaacaaggagtcgtcagaaactccagaccagtttatgacagctgatgagacaaggaacctgcagaatgtggacatgaagattggggtgtaacacctacaccattatcttggaaagaaacaaccgttggaaacataaccattacagggagctgggacacttaacagatgcaatgtgctactgattgtttcattgcgaatcttttttagcataaaattttctactcttaaaaaaaaaaaaaaaaaaaaa

SEQ ID NO: 68 - DNA, 2641 bp, human
acggtccgctgcctccatgtggagggagatacgggaagctgcatgtcaccacggagacttccttgttcgtgtctatatggttcatacatggccttcctcttaattaaagatgtcttccgaggaacattttgtctaagaataacccagtggaaatctctcacataagaagtgatggaactacacatctgagtatgagcctgcatggcatagtgagtctgcaactgtgaactcgggaaatcctgtaccttcccgtgcagtcgctccccagccatgcaggtatttccagagcctggagatcccagactacctttcaaaagaatgaattccagacccagagaggcccctggaggagattcatggcaagcagccgtacgaaataacagaagccccagagaggggaagcaatttcctgcctaagtcgtccatctgtcagtggcaaagctaggactggaactcaggattctccatccctcttcccaaacctggcactatcttcctggctttctgggtctggagtcccatgttagaggccctctgttttcagagcaggactcattgaatatgtgtgctctttctactcaagtgcttcaaggatccttcctggaaaagcctcggttccggaccagtgctgtcatggcctcaccatgtcatagaattcccatcatttcacttgtgactcccttcttcctaggacccgggcataaattcttgaagagttgatctgagtgacagactcccatgctatgccaaaaacggcctcttatttcccaatgattgagaccttttatttgatcaatctcatgtgctcactggaccccagtgataccttcacatacctgacacctcagggaaacacagcttccgttcaagtcaagatccttgctatactgcaaactcttatgaaacgtctaggagaattttcaggctcctttgtatatggaaaaaggtcagaatgaagctccaaattcttcagcatgtgtaaaaacttaagacaaccatattttatttttgttttattttttatttttttcattgtttttttttttgagacagccttgctctgttgcctaggctggagtgcagtggcgcgatctcggctcattgcaacttccacctcctgggttcaagcgattcttgtgcctcagcctcccaagtagctggaattacaggcatgcaccaccattcacagctaatttttgtatttttagtagagatggggtttcaccatgttggccaggctggtctcgacctcctgacctcaggtgatccagtcgtcttggcctcccaaagtgctgggattacaggcatgagcccctgtgcccagccaacaactacattttaaagcaactttattctcaactgaatgacattttaatcactttcttgcccatgtggatatggataaggatattttgccaatattcttgtttgtgtttgactgtgatgctattgttatacaaagaatgggcaggtggagctaagcagaaagagacagtcgggtacctgtaccatggaaaatggaagagagccaagcagactgcatccttagggggcagggaggtcagtgcaagttgggacaaagcctagctgagtcggtgagcacttcatggcagactagtcaaattatatctcttggactaagatcttcattaaaggcctgcacctcagagacatttcagcctaccaaggtgcatcattatggaagactgggcatgataatagtaatttaaatgaagttaaaagagcagtctaaattagaacaggtattcacattccaatttctcttgagaagagcctctgttggataaagaaaactcgctgagcaaaataaatcgattggaggtaaactttaccagccctggagtgcaaggtttagaaacatgcacacatcccacggtgttaagggtcctgctgttttcttccatgtcatttcatcacagaacaattttctacagcaacctgatctaccttgtggcccagtaaggcatgttttgttttgagatggagtctcactctgtcgcccaggctgtagtgcagtggcgtgatctccgctcactgcaagcactgcctcccgggttcacgccattctcctgcctcagcctcccaagtagctgggactacaggcgcccgccaccatgcccggctaattttctgtatttttattagagacggggtttcaccatgttagccaggatggtctcgatctcctgacctctgggatctgcccgtttcggcctcccaaagtgctgggattacaggtgtgagccaccgctcccagccaagcatgtgagagttttaaatcaaatgttaccttgtccctattagccttaccactgctaaatatctacacggttccctgttaaggagagtttctaaatgactctcttgagaaatcctggataaatggagaatggagcatttttcctgcctctaagctttgctccactgcaatctttcacatgctgtgtatccagagggtgactgccagatagcttcttgaagaaagggaggaggaaacggtcattttcttgctgcgctttctaacacccaacagaggaaatgcacagcataggtgtgtgggagtttggctgacttatggtaaaaaataaacatggtttcctgttaaaaaaaaaaaaaaaaa

SEQ ID NO: 69 - DNA, 1883 bp, human
agttccgcgcggggctgtcggggaaccatggctgccccgagagacaatgtcactttattattcaagttatactgcttggcagtgatgaccctgatggctgcagtctataccatagctttaagatacacaaggacatcagacaaagaactctacttttcaaccacagccgtgtgtatcacagaagttataaagttattgctaagtgtgggaattttagctaaagaaactggtagtctgggtagattcaaagcatctttaagagaaaatgtcttggggagccccaaggaactgttgaagttaagtgtgccatcgttagtgtatgctgttcagaacaacatggctttcctagctcttagcaatctggatgcagcagtgtaccaggtgacctaccagttgaagattccgtgtactgctttatgcactgttttaatgttaaaccggacactcagcaaattacagtgggtttcagtttttatgctgtgtgctggagttacgcttgtacagtggaaaccagcccaagctacaaaagtggtggtggaacaaaatccattattagggtttggcgctatagctattgctgtattgtgctcaggatttgcaggagtatattttgaaaaagttttaaagagttcagatacttctctttgggtgagaaacattcaaatgtatctatcagggattattgtgacattagctggcgtctacttgtcagatggagctgaaattaaagaaaaaggatttttctatggttacacatattatgtctggtttgtcatctttcttgcaagtgttggtggcctctacacttctgttgtggttaagtacacagacaacatcatgaaaggcttttctgcagcagcggccattgtcctttccaccattgcttcagtaatgctgtttggattacagataacactcacctttgccctgggtactcttcttgtatgtgtttccatatatctctatggattacccagacaagacactacatccatccaacaaggagaaacagcttcaaaggagagagttattggtgtgtgattttagcctcacgtgagactccttttaagactaaaccatttgcattaaactagagccttaagtcaatctcagaaggtagcataaacaaataaaaattaactgtatggcatgatcagtgcggttatgtggaaacaacaacaaacaaacgaagctatctgagtgaactgctaatacagaaacttaatgtagacctgtttggggtctactattgttttagaatgaaggaattgtattattgtgtgtatatataatttgtaaataaaaagtatggagatgatacggtgttaaaaaaaatcatggtgaggctacaatactcaagtaacaaggtttgggacaatgtctaagggttaaagtgccaaagccatttctgtactaactgttctcttgttccggtaccggggagaaggatgacccctccttattctccaattcatgtacagtattttgtcctagcagcataaagacctagctcttttcttacaagaggcagaaacaagacaggctagttcataaacaaactgaatgtgtaactaacttctcaaaatgaatctatttcataactcggacaatttctgggtggtgactgagtacccctttagtgagtacccctttagtgctatatttgtgccattcattatctggttcatatttctttgctgttagatgatacacatttcttcaaaaaaatttctaatgtcacttttgtacttttttaaataaagtatgtttaactgttgggctctcaataatttgtgaaatttcagtgttttctataatgttaatggggaaattcagcaataaactttatttgcaaaaaaaaaaaaaaaaaaaaaaaaaaaaaa

SEQ ID NO: 70 - DNA, 2536 bp, human
agcgggtgcggggcgggaccggcccggcctatatattgggttggcgccggcgccagctgagccgagcggtagctggtctggcgaggttttatacacctgaaagaagagaatgtcaagacgaagtagccgtttacaagctaagcagcagccccagcccagccagacggaatccccccaagaagcccagataatccaggccaagaagaggaaaactacccaggatgtcaaaagaagtctggctaaacatgttaaaaaaggagagcagatatgttcatgacaaacattttgaagttctgcattctgacttggaaccacagatgaggtccatacttctagactggcttttagaggtatgtgaagtatacacacttcatagggaaacattttatcttgcacaagacttttttgatagatttatgttgacacaaaaggatataaataaaaatatgcttcaactcattggaattacctcattattcattgcttccaaacttgaggaaatctatgctcctaaactccaagagtttgcttacgtcactgatggtgcttgcagtgaagaggatatcttaaggatggaactcattatattaaaggctttaaaatgggaactttgtcctgtaacaatcatctcctggctaaatctctttctccaagttgatgctcttaaagatgctcctaaagttcttctacctcagtattctcaggaaacattcattcaaatagctcagcttttagatctgtgtattctagccattgattcattagagttccagtacagaatactgactgctgctgccttgtgccattttacctccattgaagtggttaagaaagcctcaggtttggagtgggacagtatttcagaatgtgtagattggatggtaccttttgtcaatgtagtaaaaagtactagtccagtgaagctgaagacttttaagaagattcctatggaagacagacataatatccagacacatacaaactatttggctatgctggaggaagtaaattacataaacaccttcagaaaagggggacagttgtcaccagtgtgcaatggaggcattatgacaccaccgaagagcactgaaaaaccaccaggaaaacactaaagaagataactaagcaaacaagttggaattcaccaagattgggtagaactggtatcactgaactactaaagttttacagaaagtagtgctgtgattgattgccctagccaattcacaagttacactgccattctgattttaaaacttacaattggcactaaagaatacatttaattatttcctatgttagctgttaaagaaacagcaggacttgtttacaaagatgtcttcattcccaaggttactggatagaagccaaccacagtctataccatagcaatgtttttcctttaatccagtgttactgtgtttatcttgataaactaggaattttgtcactggagttttggactggataagtgctaccttaaagggtatactaagtgatacagtactttgaatctagttgttagattctcaaaattcctacactcttgactagtgcaatttggttcttgaaaattaaatttaaacttgtttacaaaggtttagttttgtaataaggtgactaatttatctatagctgctatagcaagctattataaaacttgaatttctacaaatggtgaaatttaatgttttttaaactagtttatttgccttgccataacacattttttaactaataaggcttagatgaacatggtgttcaacctgtgctctaaacagtgggagtaccaaagaaattataaacaagataaatgctgtggctccttcctaactggggctttcttgacatgtaggttgcttggtaataacctttttgtatatcacaatttgggtgaaaaacttaagtaccctttcaaactatttatatgaggaagtcactttactactctaagatatccctaaggaatttttttttttaatttagtgtgactaaggctttatttatgtttgtgaaactgttaaggtcctttctaaattcctccattgtgagataaggacagtgtcaaagtgataaagcttaacacttgacctaaacttctattttcttaaggaagaagagtattaaatatatactgactcctagaaatctatttattaaaaaaagacatgaaaacttgctgtacataggctagctatttctaaatattttaaattagcttttctaaaaaaaaaatccagcctcataaagtagattagaaaactagattgctagtttattttgttatcagatatgtgaatctcttctccctttgaagaaactatacatttattgttacggtatgaagtcttctgtatagtttgtttttaaactaatatttgtttcagtattttgtctgaaaagaaaacaccactaattgtgtacatatgtattatataaacttaaccttttaatactgtttatttttagcccattgtttaaaaaataaaagttaaaaaaatttaactgcttaaaagtaaaaaaaaaaaaaaaaaaa

SEQ ID NO: 71 - DNA, 9061 bp, human
atgaatggtcaccgttttacgttcagaactcgttcgcttctacctttacaaaagggacaacacagatgcattactaagctcttggctcataacgatccctggggtatattcagagccccttcctcgcggcgttcatatagtgtctcaggggtctgtcagccagcaatccccaattcctcattacatattcctcacaatgcatgctggctaaaatggaaattgtgttcagaaatagccctgccctaccatcatatactaggagaaaggaggaaattatgctctattagaaagtttgaacactggcgggaagatgtccgcagctgttgccaggccagggttctcccgagagggaggacgctgggactgtggcttgccctgatcggccgagaagagtttgccatgaatcttctgcgtcggagtgggaaacggcggcgttcagaatcaggctcagattcgttctcgggaagcggcggtgacagcagtgccagcccccagttcctctccgggtccgtgctgagcccgccgcccggccttggtcgctgcctgaaggccgcagctgcaggagaatgcaagcctacagttcctgactacgaaatagacaagctactattggcaaactggggacttcctaaagcagttctggaaaaataccacagttttggtgtaaaaaagatgtttgaatggcaggcagagtgccttttgcttggacaagtcctggaaggaaagaatttagtttattcagctcctacaagtgctgggaagactcttgtggcagaattacttattttgaagcgggttttggaaatgcggaagaaagctttgtttattcttccctttgtttctgtggctaaagagaagaaatactacctccagagtctgtttcaggaagtaggaataaaagtagacggttatatgggcagcacctctccatcaaggcatttctcttcattggatattgcagtctgcacaattgagagagccaatggtctgatcaatcgcctcatagaggaaaataagatggatctgttaggaatggtggttgtggatgaattacatatgctgggagactctcaccgagggtatctgctggaacttttgctgaccaagatttgctatattactcggaaatcagcatcttgtcaggcagatctagccagttctctgtctaatgctgtgcaaatcgttggcatgagtgctacccttcctaatttggagcttgtggcttcctggttgaatgctgaactctaccataccgactttcgccctgtaccgcttttggagtcagtaaaagttggaaattccatatatgactcttcaatgaaacttgtgagggaatttgagcccatgctacaagtgaagggagatgaggaccatgttgttagtttatgttatgagacgatttgtgataaccattcagtattacttttttgtccatcaaagaaatggtgtgagaagctggcagatatcattgctcgagagttttataatctacatcatcaagctgagggtgagggattggtgaaaccctctgaatgcccaccagtaattctggaacaaaaagaactcctggaagtgatggatcagttaagacgtttgccttcaggactggactctgtattacagaaaactgtaccatggggagtagcatttcatcatgcaggtcttacttttgaggagagggatatcattgaaggagcctttcgtcaaggtctcattcgggtcttggcggcaacttctactctttcttctggggtgaatttacctgcacgtcgtgtgattattcgaacccctatttttggtggtcgacctctagatattcttacttataagcagatggttggccgtgctggcaggaaaggagtggacacagtagggagtatcttaatttgtaagaactctgagaaatcaaaaggcatagctctccttcagggttctctaaagcctgttcgcagctgtctgcaaagacgagaaggagaagaagtaactggcagcatgatacgagctattctggagataatagttggtggagtggcaagtacatcacaagatatgcatacttatgctgcctgcacatttttggctgcaagtatgaaagaagggaagcaaggaattcagagaaatcaagagtctgttcagcttggagcgattgaggcctgtgtgatgtggctactagaaaatgaattcatccagagtacagaagccagtgatggaacagaaggaaaggtgtatcatccaacacatcttggttcggccactctttcttcttcactttctccagctgatactttagatatttttgctgacctgcaaagagcaatgaagggctttgttttagagaatgatcttcatattctctatctggttacacctatgtttgaggattggactactattgattggtatcgatttttctgtttatgggagaagttgccaacttcaatgaaaagggtggcagagctagtgggagttgaagaggggttcttggcccgttgtgtgaaaggaaaagtagtagccagaactgagagacagcatcgacaaatggccatccataaaaggtttttcaccagtcttgtgctattagatttaatcagtgaagttcccttaagggaaataaatcagaaatatggatgcaatcgtgggcagattcaatctttgcaacagtcagctgctgtttatgcagggatgattacagtattttccaaccgtctgggctggcacaacatggaactactactttcccaatttcagaagcgtcttacgtttggcatccagagggagctgtgtgacctggttcgggtatccttactaaatgctcagagagccagggttctctatgcttctggctttcatactgtggcagaccttgctagagcaaatattgtggaggtggaggtgattctgaaaaatgctgtgcctttcaaaagtgcccggaaggcagtggatgaggaagaggaagcagttgaagaacgtcgcaatatgcgaactatctgggtgactggcagaaaaggtttaactgaaagggaagcagcagcccttatagtggaagaagccagaatgattctgcagcaggacttagttgaaatgggagtgcaatggaatccatgtgccctgttacattctagtacatgctcattgactcatagtgagtccgaagtaaaggaacacacatttatatcccaaactaagagttcttataaaaaattaacatcaaagaacaaaagtaacacaatatttagtgattcttatattaagcattcaccaaatatagtgcaagacttaaataaaagtagagagcatacaagttcctttaattgtaatttccagaatgggaatcaagaacatcagacatgttccattttcagagcaagaaaacgggcctctttagatataaataaagagaagccaggagcctctcagaatgaggggaaaacaagtgataagaaagttgttcagactttttcacagaaaacaaaaaaggcacctttgaatttcaattcagaaaagatgagcagaagttttcgatcttggaaacgtagaaagcatctaaagcgatctagggacagcagccccctgaaagactctggagcgtgtagaatccatttacaaggacagactctgtctaatcctagtctttgtgaagacccgtttaccttagatgagaagaaaacggaatttagaaattcagggccatttgctaaaaatgtatctttgagtggtaaggaaaaagataataaaacatcattcccattacaaataaagcaaaattgttcatggaacataacactaactaatgataattttgtggagcatattgtcacaggatctcagagtaaaaatgtgacttgtcaggccactagtgtggttagtgaaaagggcagaggagtagctgttgaggcagaaaaaataaatgaagtgctgatacaaaatggttcaaaaaaccagaatgtttatatgaaacaccatgacatccatccaattaaccagtacctgcgaaagcaatctcatgaacagacaagcactattaccaaacagaaaaatataatagagagacaaatgccctgtgaagcagtcagtagttacataaatagagactcaaatgttactatcaattgtgaaaggataaagcttaatacagaggaaaataaaccaagtcattttcaggcattaggagatgatataagcagaactgtgatacccagtgaagtacttccatcagctggagcatttagcaaatcagaaggccagcatgagaattttctaaatatttctagactacaagaaaaaacaggtacttatacaacaaacaaaactaaaaataatcatgtttctgacttaggtttagtcctctgtgattttgaagatagtttctatctggatactcagtcagagaaaataatacaacagatggcaactgaaaatgccaaactaggagcaaaggacaccaacctggcagcagggataatgcagaagagcttagtccaacagaactcaatgaactcttttcagaaggagtgtcacattccttttcctgctgaacagcaccctctaggagcgactaagatagatcatttggaccttaagactgtaggtactatgaaacaaagcagtgattcacatggggttgatatcctgactccagaaagcccgattttccattctccaatactattggaggaaaatggtctttttttaaaaaagaatgaagtttctgttactgattcacaattaaatagttttcttcaaggttatcaaacacaagaaactgtgaaaccagttatacttctgattcctcaaaagagaactcccactggtgtagaaggagaatgtcttccagttcctgaaacaagtttgaatatgagtgatagtttactatttgatagcttcagtgatgactatctagtaaaagaacaattacctgatatgcaaatgaaagaaccccttccttcagaagtaacatcaaaccattttagtgattctctgtgtctacaagaagacctaattaaaaaatcaaatgtaaatgagaatcaagatacccaccagcagttgacttgttccaatgatgaatctattatattttcagaaatggattctgttcagatggttgaagctttggacaatgtggatatatttcctgtccaagagaagaatcatactgtagtatctcctagagcattagaactaagtgatccagtacttgatgagcaccaccaaggtgatcaagatggaggagatcaagatgaaagggctgaaaaatcaaaattaactgggaccaggcaaaatcattcattcatatggtcaggggcatcatttgatctaagtccaggactgcaaaggattttagataaagtatccagtcctctagaaaatgaaaagctaaaatcaatgactataaacttttccagtttgaatagaaaaaatacagagttaaatgaagaacaagaagttatttcaaacttggagacaaaacaagtgcagggaatttcattttcttctaataatgaagtaaaaagcaagattgagatgctagaaaacaatgccaatcatgatgaaacctcatccctcttacctcgtaaagaaagtaatatagttgatgataatggtctcattcctcctacacccattccaacatctgcttctaagctgacatttccagggattcttgaaacacctgtaaacccttggaaaactaataatgttttacaacctggtgaaagttatttatttggctcaccttcagatattaaaaaccacgatttaagtccagggagtagaaatgggttcaaagacaacagccctattagtgacacaagcttttcacttcagttatcacaggatggattacagttaactccagcctcaagcagttcagaaagtttgtccataattgatgtagcaagtgaccaaaatcttttccaaacattcattaaggagtggcggtgcaaaaagcgattttccatctcactggcttgtgaaaagattagaagtttgacatcttctaaaactgctactattggcagtaggtttaagcaagctagctcacctcaggaaattcctattagagatgatggatttcccattaaaggttgtgatgacaccttggtggttggactggcagtatgctggggtggaagggatgcctattatttttcactgcagaaggaacaaaagcattctgaaattagtgccagtttggttccaccttctttagatccaagcctgactttgaaagacaggatgtggtaccttcaatcttgcttgcgaaaggaatctgataaagaatgttctgttgtcatctatgacttcatccagagctataaaattcttcttctttcttgtggcatctccttggagcaaagttatgaagatcctaaggtggcatgctggttactagatccagattctcaggagccgactcttcatagcatagttaccagttttcttcctcatgagcttccactcctagaagggatggagaccagccaagggattcaaagcctggggctaaatgctggcagtgagcattctgggcgatacagagcatctgtggagtccattctcatcttcaactctatgaatcagctcaactctttgttgcagaaggaaaaccttcaagatgttttccgtaaggtggaaatgccctctcagtactgcttggccttgctagaactaaatggaattggctttagtactgcagaatgtgaaagtcagaaacatataatgcaagccaagctggatgcaattgagacccaggcctatcaactagctggccacagtttttctttcaccagttcagatgacatcgctgaggttttatttttggaattgaagttgcccccaaatagagagatgaaaaaccaaggcagcaagaaaactctgggttctaccagaagagggattgacaatggacgcaagctaaggctgggaagacagttcagcactagtaaggacgttttaaataaattaaaggcattacatcctttaccaggcttgatattagaatggagaagaatcactaatgctattaccaaagtggtctttccccttcagcgggaaaagtgtcttaatccttttcttggaatggaaagaatctatcctgtatcacagtcgcacactgctacaggacgaataacctttacagaaccaaatattcagaatgtgccaagagattttgaaatcaaaatgccaacactagtaggagaaagcccaccttctcaagctgtaggcaaaggcctacttcccatgggcagaggaaaatataagaagggtttcagcgtgaatcctagatgccaggcacagatggaggagagagctgcagacagaggaatgccattttcaattagcatgcgacatgcctttgtgcctttcccaggtggttcaatactggctgctgactactctcagcttgaactgaggatcttggctcatttatcccatgatcgtcgtctcattcaagtgttaaacactggagctgatgttttcaggagcattgcagcagagtggaagatgattgagccagagtctgttggggatgatctgaggcagcaggcaaaacagatttgctatgggatcatttatggaatgggagctaaatctttgggagagcagatgggcattaaagaaaatgatgctgcatgctatattgactccttcaaatccagatacacagggattaatcaattcatgacagagacagtgaagaattgtaaaagagacggatttgttcagaccattttgggaaggcgtagatatttgccaggaatcaaagacaacaacccttatcgtaaagctcacgctgagcgtcaagctatcaacacaatagtccaaggatcagcagctgatattgtcaaaatagccacagttaacattcagaagcaattagagaccttccactcaaccttcaaatcccatggtcatcgagagggtatgctccaaagtgaccgaacaggattgtcacgaaagagaaaactgcaagggatgttctgcccaatcagaggaggcttcttcatccttcaactccatgatgaactcctatatgaagtggtagaagaagatgttgttcaggtagctcagattgtcaagaatgaaatggaaagtgctgtaaaactgtctgtgaaattgaaagtgaaagtgaaaataggcgccagctggggagagctaaaggactttgatgtgtaactgtgctgttgatgaagtcctcccagggaagcctgtgcagatgcagtcacctggaaagaacagagattaccctttcacctacctcagcaaaacaaactttcaagtcttgatagacttagcctagtaattttatagtgagagtttcaaactatatatcagtgtctatagcatcaaaaacttctgggggcgtgggggaagtagaataccaagtataatagttacattcactttcaaagagcatctatgaatttgccttttgtaacttactgtggctttaaacatattcagaacagatgcttgaaatatgcacttagcactttggttccacatctgtctgggtaaaccatgaagaaaatgaagctgctgcctcaatcgacccagacagcagccataggcagataaagatttggtttcaccctggtggtggtaggcatcgtgtgtgactttttttcctctaatatcaattttacagtacggaaatagtattttaaaatagtattggctaataaattatgaattctataaagtagtaagacttggtatggttggagtgtaggaatgaatattcatgaaatgtttcttattgcttttccttccctaattcatacaatgaatgtatttggaatacttacatattataaaataaactatacctcttcaagaggtatcctgttctgtaagatcagatgtttttattgcaggtcaatataatactgccagagacagaaaatacccccttatcagtcccttagtgcctctttctgtttgtggcatggtgagaaaacccatgctgaaaagattgtactttgtgatcccaatcagagggatggagctaatctttttgctgttgaaataaaatgaatttatgagaaaaaaaaaaaaaaaa

SEQ ID NO: 72 - DNA, 569 bp, human
tggtcctttggcgtcgtcctcaagttatattagaatcgtgtcctcccggctttggccaacttactattctaggacttgattccttcattcagtcacaatttattgagcaccgactttgcatcaacctcttgctgaagataacagtgctgacaatatacagccctgccctcagagcttatatagtagaggagaaaaagtgaacccataatatacagtcagtagcgagtatttactaagtactttctatttgcgaggccctgataaaagtactgtcctggccaggcgcggtggctcacgcctgtaattccagcactttgggaggtcgaggtgggcagatcacctaaggtcaggagttcgagatcagcctggctaacatggggaaaccccgtctctactaaaaatggaaaaattagctgggcatggtggcgggcgcctgtaatcccagctactcgggaggctgagacaggagaatgacttgaacccaggagttgcagtggccaagataagatagcgccattgtactccagcctgggtaacacagcgagactgtgtctcaaaaaaaaaaaaaa

SEQ ID NO: 73 - DNA, 3213 bp, human
aatcatcgctcgcagcggcggcgcccgcagtggccgcagcagcgcgccgggccctggccgcgccccagccgagcgcagcgcggagtcgccccgacctttctctgcgcagtacggccgccgggaccgcagcatggcgggcatcgcggccaagctggcgaaggaccgggaggcggccgaggggctgggctcccacgagagggccatcaagtacctcaaccaggactacgaggcgctgcggaacgagtgcctggaggccgggacgctcttccaggacccgtccttcccggccatcccctcggccctgggcttcaaggagttggggccctactccagcaaaacccggggcatgagatggaagcgccccacggagatctgcgctgacccccagtttatcattggaggagccacccgcacagacatctgccaaggagccctaggtgactgctggctgctggcagccattgcctccctcaccttgaatgaagaaatcctggctcgagtcgtccccctaaaccagagcttccaggaaaactatgcagggatctttcacttccagttctggcaatacggcgagtgggtggaggtggtggtggatgacaggctgcccaccaaggacggggagctgctctttgtgcattcagccgaagggagcgagttctggagcgccctgctggagaaggcatacgccaagatcaacggatgctatgaagctctatcagggggtgccaccactgagggcttcgaagacttcaccggaggcattgctgagtggtatgagttgaagaagccccctcccaacctgttcaagatcatccagaaagctctgcaaaaaggctctctccttggctgctccatcgacatcaccagcgccgcggactcggaggccatcacgtttcagaagctggtgaaggggcacgcgtactcggtcaccggagccgaggaggttgaaagtaacggaagcctacagaaactgatccgcatccgaaatccctggggagaagtggagtggacagggcggtggaatgacaactgcccaagctggaacactatagacccagaggagagggaaaggctgaccagacggcatgaagatggagaattctggatgtctttcagtgacttcctgaggcactattcccgcctggagatctgtaacctgaccccagacactctcaccagcgatacctacaagaagtggaaactcaccaaaatggatgggaactggaggcggggctccaccgcgggaggttgcaggaactacccgaacacattctggatgaaccctcagtacctgatcaagctggaggaggaggatgaggacgaggaggatggggagagcggctgcaccttcctggtggggctcattcagaagcaccgacggcggcagaggaagatgggcgaggacatgcacaccatcggctttggcatctatgaggttccagaggagttaagtgggcagaccaacatccacctcagcaaaaacttcttcctgacgaatcgcgccagggagcgctcagacaccttcatcaacctccgggaggtgctcaaccgcttcaagctgccgccaggagagtacattctcgtgccttccaccttcgaacccaacaaggatggggatttctgcatccgggtcttttctgaaaagaaagctgactaccaagctgtcgatgatgaaatcgaggccaatcttgaagagttcgacatcagcgaggatgacattgatgatggagtcaggagactgtttgcccagttggcaggagaggatgcggagatctctgcctttgagctgcagaccatcctgagaagggttctagcaaagcgccaagatatcaagtcagatggcttcagcatcgagacatgcaaaattatggttgacatgctagattcggacgggagtggcaagctggggctgaaggagttctacattctctggacgaagattcaaaaataccaaaaaatttaccgagaaatcgacgttgacaggtctggtaccatgaattcctatgaaatgcggaaggcattagaagaagcaggtttcaagatgccctgtcaactccaccaagtcatcgttgctcggtttgcagatgaccagctcatcatcgattttgataattttgttcggtgtttggttcggctggaaacgctattcaagatatttaagcagctggatcccgagaatactggaacaatagagctcgaccttatctcttggctctgtttctcagtactttgaagttataactaatctgcctgaagacttctcatgatggaaaatcagccaaggactaagcttccatagaaatacactttgtatctggacctcaaaattatgggaacatttacttaaacggatgatcatagctgaaaataatgatactgtcaatttgagatagcagaagtttcacacatcaaagtaaaagatttgcatatcattatactaaatgcaaatgagtcgcttaacccttgacaaggtcaaagaaagctttaaatctgtaaatagtatacactttttacttttacacactttcctgttcatagcaatattaaatcaggaaaaaaaaatgcagggaggtatttaacagctgagcaaaaacattgagtcgctctcaaaggacacgaggcccttggcagggaatatttaaagcaacttcaagtttaaaatgcagctgttgattctaccaaacaacagtccaagattaccatttcccatgagccaactgggaaacatggtatatcatgaagtaatcttgtcaaggcatctggagagtccaggagaggagactcacctctgtcgcttgggttaaacaagagacaggttttgtagaatattgattggtaatagtaaatcgttctccttacaatcaagttcttgaccctattcggccttatacatctggtcttacaaagaccaaagggatcctgcgcttgatcaactgaaccagtatgccaaaaccaggcatccaatttgtaaaccaattatgataaaggacaaaataagctgtttgccacctcaaaactttatgaacttcaccaccactagtgtctgtccatggagttagaggggacatcacttagaagttcttatagaaaggacacaagtttgtttcctggctttaccttgggaaaatgctagcaacattatagaaattttgccttgttgccttatcttcttccaaatgtactgttaaataaaaataaagggttaccccatcg

SEQ ID NO: 74 - DNA, 1847 bp, human
ttgcgcgccgcccggccaggcccgcaaagaggcctccgagcgccatggctgcgcccccggcccgcgcggacgctgatccttcgcccacgtcgccacctacggcccgagacacaccaggccggcaggctgagaaaagcgagaccgcgtgcgaggaccgcagcaatgcagagtccctggacaggctcctgccacctgtgggcactgggcgctctccccggaagcggaccaccagccagtgcaagtcagagcctcccctgctgcgtacaagcaagcgtaccatctacaccgccgggcggccgccctggtacaatgaacacggcacgcaatccaaagaggccttcgccatcggcttgggaggcggcagtgcctctgggaagaccactgtggccagaatgatcatcgaggccctggatgtgccctgggtggtcttgctgtccatggactccttctacaaggtgctgactgagcagcagcaggaacaggccgcacacaacaacttcaacttcgaccacccagatgcctttgacttcgacctcatcatttccaccctcaagaagctgaagcaggggaagagtgtcaaggtgcccatttatgacttcaccacgcacagccggaagaaggactggaaaacactgtatggtgcaaacgtcatcatctttgagggcatcatggcctttgctgacaagacactgttggagctcctggacatgaagatctttgtggacacagactccgacatccgcctggtacggcggctgcgccgggacatcagtgagcgcggccgggacatcgagggtgtcatcaagcagtacaacaagtttgtcaagccctccttcgaccagtacatccagcccaccatgcgcctggcagacatcgtggtccccagagggagcggcaacacggtggccatcaacctgattgtgcagcacgtgcacagccagctggaggagcgtgaactcagcgtcagggctgcgctggcctcggcacaccagtgccacccgctgccccggacgctgagcgtcctgaagagcacgccgcaggtacggggcatgcacaccatcatcagggacaaggagaccagtcgcgacgagttcatcttctactccaagagactgatgcggctgctcatcgagcacgcgctctccttcctgccctttcaggactgcgtcgtacagaccccgcaggggcaggactatgcgggcaagtgctatgcggggaagcagatcaccggtgtgtccattctgcgcgccggtgaaaccatggagcccgcgctgcgcgctgtgtgcaaagacgtgcgcatcggcaccatcctcatccagaccaaccagcttaccggggagcccgagctccactacctgaggctgcccaaggacatcagcgatgaccacgtgatcctcatggactgcaccgtgtccacgggcgcggcggccatgatggcagtgcgcgtgctcctggaccacgacgtgcctgaggacaagatctttttgctgtcgctgctcatggcagagatgggcgtgcactcagtggcctatgcatttccgcgagtgagaatcatcaccacggcggtggacaagcgggtcaatgaccttttccgcatcatcccaggcattgggaactttggcgaccgctactttgggacagacgcggtccccgatggcagtgacgaggaggaagtggcctacacgggttagctgcccagtgagccatcccgtccccaccaccctcctcctgcctcctgacccaggactgttgaatacaaagatgttaatttttaaaatgttactagtataatttattctatgcattttataaaataaataaagctttagaaaaaaaaaaaaaaaaaa

SEQ ID NO: 75 - DNA, 813 bp, human
cagcggaggtggcgctggctaatctcaagaacaaatatgaaaatgaaaaagcaatggtgactgaaaccatgacgaagcttagaaatgaactgaaggctttgaaagaagatgctgcaaccttctcatccctgagagcaatgtttgcaacaagatgtgatgaatatgtcacccagttggatgagatgcagagacagttagcagctgcagaggatgagaagaagactctgaacactttgttacgaatggctatccagcaaaaactcgccctgacccagaggctggagggcttagagtttgaccatgagcagtcccgacgcagcaaaggcaaacttggaaagagcaagatcggcagccctaaagtaagtggggaggcatcagtcaccgtgcccaccatagacacttacctcctgcatagtcagggcccacagacacccaacattcgggtcagcagtggcactcagaggaaaaggtatgcatgcagcgatcttcatagtacggtgcagtggccagattttagttaactgcaaaaataaatgtgctcttgttgtggaggatggaggaggggaagcaaaagaaaaaatgggagctggcatataaatggtcttgctaatgtggctctttccagatcaaaacctttttgataattgtgtttatgtagtcctttctaaccccctgcccaatccctcctcttgattaatcgtaatataattttcaagygtctgttaatatttttgctactctttgtatgtgtaaatatgcctctcccttacctccaacctgagaattggtagataaaggtggatattaagaatg

SEQ ID NO: 76 - DNA, 1841 bp, human
actgcgccgccaccgtcaataggtggaccccctcccggagataaaaccgccggcgccggcgccgccagtccctctggctgagacctcggctccggaatcactgcagcccccctcgccctgagccagagcaccccgggtcccgccagcccctcacactcccagcaaaatgggcaaggagaagacccacatcaacatcgtggtcatcggccacgtggactccggaaagtccaccaccacgggccacctcatctacaaatgcggaggtattgacaaaaggaccattgagaagttcgagaaggaggcggctgagatggggaagggatccttcaagtatgcctgggtgctggacaagctgaaggcggagcgtgagcgcggcatcaccatcgacatctccctctggaagttcgagaccaccaagtactacatcaccatcatcgatgcccccggccaccgcgacttcatcaagaacatgatcacgggtacatcccaggcggactgcgcagtgctgatcgtggcggcgggcgtgggcgagttcgaggcgggcatctccaagaatgggcagacgcgggagcatgccctgctggcctacacgctgggtgtgaagcagctcatcgtgggcgtgaacaaaatggactccacagagccggcctacagcgagaagcgctacgacgagatcgtcaaggaagtcagcgcctacatcaagaagatcggctacaacccggccaccgtgccctttgtgcccatctccggctggcacggtgacaacatgctggagccctcccccaacatgccgtggttcaagggctggaaggtggagcgtaaggagggcaacgcaagcggcgtgtccctgctggaggccctggacaccatcctgccccccacgcgccccacggacaagcccctgcgcctgccgctgcaggacgtgtacaagattggcggcattggcacggtgcccgtgggccgggtggagaccggcatcctgcggccgggcatggtggtgacctttgcgccagtgaacatcaccactgaggtgaagtcagtggagatgcaccacgaggctctgagcgaagctctgcccggcgacaacgtcggcttcaatgtgaagaacgtgtcggtgaaggacatccggcggggcaacgtgtgtggggacagcaagtctgacccgccgcaggaggctgctcagttcacctcccaggtcatcatcctgaaccacccggggcagattagcgccggctactccccggtcatcgactgccacacagcccacatcgcctgcaagtttgcggagctgaaggagaagattgaccggcgctctggcaagaagctggaggacaaccccaagtccctgaagtctggagacgcggccatcgtggagatggtgccgggaaagcccatgtgtgtggagagcttctcccagtacccgcctctcggccgcttcgccgtgcgcgacatgaggcagacggtggccgtaggcgtcatcaagaacgtggagaagaagagcggcggcgccggcaaggtcaccaagtcggcgcagaaggcgcagaaggcgggcaagtgaagcgcgggcgcccgcggcgcgaccctccccggcggcgccgcgctccgaaccccggcccggcccccgccccgcccccgccccgcgcgccgctccggcgccccgcacccccgccaggcgcatgtctgcacctccgcttgccagaggccctcggtcagcgactggatgctcgccatcaaggtccagtggaagttcttcaagaggaaaggcgcccccgccccaggcttccgcgcccagcgctcgccacgctcagtgcccgttttaccaataaactgagcgaccccag

SEQ ID NO: 77 - DNA, 2837 bp, human
tgaaaagatccttacggcttctgttgtttcatagcttctgcttacagtgttctgggtatccttcagttttgctaccaccctatagcctctcagtgtgcctcacatttagatacctccagagagaatccgattggattcttcagccattatctaatataggggtgcatggcaaccagtgcataaggaaccacttgtggctacttactcagaggagacttcagatctaggagacagtcagagtaccatgtccagaatatataccatgatgaattagcaagatgcagttttcaatacatagatgcaaagtgattatggtatgagaattttttaatctcagattttgtaatttgcttttacaaagcacccatttgacagcaccttgtttaaagaccacaaaaagcatgtccttaaaactatagtcacattcttggtgctcccttcactttgtttggggtattaatactactctgaggctgccatgggaccacctgttccaaaaatattctttgatgtggattgagtagtttttactgtgattattctaccaagataaacatagaatttattgcctttcacagtaataataagaaaacattgttaaagaaggtttcggccaggcacggtggctcacgcctgtaatcccagcactttgggaggccgccgagccaggcagatcacaaggtcaggagtttgagaccagcctgaccaacgtggtgaaatcccatctctactaaaaatacaaaaattagccgggcatggtagcacacacctgtaatcccagctactcaggaggctgaggcaggagaatcacttgaaccggggaggtggaggttgcagtgagctcacatcacgccactgtactccagcctaggtgacagagcgagactctgtctcaaaaaaaaaaaaaaaaaaaaactttctttggttgactaacaatttttcattgttctaatgggtgtcttcctccttcacaagggaggaagatcctccaaagtatctgtgagtataatcttataactggtgtttttgttaagaaataattaggagtcaccaggcactccattttttaagttcacaaatttcaaactttttttttaaagatttacttcctcattttaatagggacagaaggataaaaagtatatttctgccatcttagggggatggaagttttggtaactctctctcctttgaaggtcctggaatcgtttattataatatataccatttagtatacatgttgggctgtctgaatgagaacatacccatcagtgtgcacatgtgcttacaaacatgttcattcatttagtgaaattaagagtggaagcaggctgttttcagaaaaaatatttgagggctgagttccctctttcattcatcccatgagggtattactagggggtttaatatatttgggttaatgatgagggggaaaaaatagcatccttttggggaaatagaaccagacacaatttaaagtgggacccaaatagaaacataattcttttatgaaacaaatgttttattttctgtttgtcacacggatgccatctaaattttaaaagaaatctaggcttcctcttattctttatgttttttttaaaagcaagaagtcagagactttgtacatcatgattaacttctacatttgtttgagctatgtgtcacaagtaattaagttataaatattctgaagattaattggtgcacactctaagtgctttttaaattttacacagcttacctttctttctgaagaatgtcctcacaaagatagattatatcaatttctccactgatgatgtattccagcaataaacatagtcctagaattgtagaatgtgcactgctgcactctgtcctaacagacagtagacaaggtttataatttttttctatgggacactaaaaataccctaggatttcctttaactttttgcactgacaggtctaaagcaaagccacagaagctgctcttgctcagtaagtattgttaatgctgcagtgcatattaaaatttcagaaaacccaattatgtactatctaggtgtggatagctctcattgttagtatcctaaatcatctaaaggcttgttttctttcttttttttttttttacagacctaactaccataatgaatgctgcatattaagagaaaccacaagaaggttatatgtttggttgtctaatattcttggatttgatatgaaccaacacatagtccttgttgtcattgacagaaccccagtttgtatgtacattattcatattcctctctgttgtgtttcggggggaaaagacattttagccttttttaaaagttactgatttaatttcatgttatttggttgcatgaagttgcccttaaccactaaggattatcaagatttttgcgcagacttatacatgtctaggatccttttatcaaggcagttatgatcatcgttttcctgccttgaccccaccatcatcaaacactcagttaaatataaattaacattttttagatgaccactcaacataatgcttaagaatggaatttcctctctgtgacagaacccaggaattaattcctaaatacataacgttggtatattgaagacgaaattaaaattgtccttcagttttgaggccatgtgtaaagtttaaccatattgtaaaatatctattccgtattagaaatagctagttgacagcttatacttctcaaaattcatattgttatgtacacaaactaagtttctatatgtgaagttagtgagtctttttgtgttactccaaaataaaggcaatgatttattttttaaaaaaaaaaaaaaaaaaaaaaaaaaaaaag

SEQ ID NO: 78 - DNA, 1684 bp, human
cgacggagtgccaggagcactaacagtacccttagcttgctttcctcctccctcctttttattttcaagttcctttttatttctccttgcgtaacaaccttcttcccttctgcaccactgcccgtacccttacccgccccgccacctccttgctaccccactcttgaaaccacagctgttggcagggtccccagctcatgccagcctcatctcctttcttgctagcccccaaagggcctccaggcaacatggggggcccagtcagagagccggcactctcagttgccctctggttgagttggggggcagctctgggggccgtggcttgtgccatggctctgctgacccaacaaacagagctgcagagcctcaggagagaggtgagccggctgcaggggacaggaggcccctcccagaatggggaagggtatccctggcagagtctcccggagcagagttccgatgccctggaagcctgggagaatggggagagatcccggaaaaggagagcagtgctcacccaaaaacagaagaatgactccgatgtgacagaggtgatgtggcaaccagctcttaggcgtgggagaggcctacaggcccaaggatatggtgtccgaatccaggatgctggagtttatctgctgtatagccaggtcctgtttcaagacgtgactttcaccatgggtcaggtggtgtctcgagaaggccaaggaaggcaggagactctattccgatgtataagaagtatgccctcccacccggaccgggcctacaacagctgctatagcgcaggtgtcttccatttacaccaaggggatattctgagtgtcataattccccgggcaagggcgaaacttaacctctctccacatggaaccttcctggggtttgtgaaactgtgattgtgttataaaaagtggctcccagcttggaagaccagggtgggtacatactggagacagccaagagctgagtatataaaggagagggaatgtgcaggaacagaggcgtcttcctgggtttggctccccgttcctcacttttcccttttcattcccaccccctagactttgattttacggatatcttgcttctgttccccatggagctccgaattcttgcgtgtgtgtagatgaggggcgggggacgggcgccaggcattgttcagacctggtcggggcccactggaagcatccagaacagcaccaccatctagcggccgctcgagggaagcacccgccggttggccgaagtccacgaagccgccctctgctagggaaaacccctggttctccatgccacacctctctccaggtgccctctgcctcttcaccccacaagaagccttatcctacgtccttctctccatctatcggaccccagtttccatcactatctccagagatgtagctattatgcgcccgtctacagggggtgcccgacgatgacggtgccttcgcagtcaaattactcttcgggtcccaaggtttggctttcacgcgctccattgccccggcgtggcaggccattccaagcccttccgggctggaactggtgtcggaggagcctcgggtgtatcgtacgccctggtgttggtgttgcctcactcctctgagctcttctttctgatcaagccctgcttaaagttaaataaaatagaatgaatgataaaaaaaaaaaaaaa

SEQ ID NO: 79 - DNA, 1973 bp, human
agccgccgcctcgccgcttcccctcgtcggagcggccgctcgtccgcccggcttgaggcccgcggggagcgcggcgcaattcgtcggcccgcgggggggcggcctcccggcatcttcgcggcgaccaaggactaccaggaaggggagcggctgggatggcgcgtccgcggccccgcgagtacaaagcgggcgacctggtcttcgccaagatgaagggctacccgcactggccggcccggattgatgaactcccagagggcgctgtgaagcctccagcaaacaagtatcctatcttcttttttggcacccatgaaactgcatttctaggtcccaaagacctttttccatataaggagtacaaagacaagtttggaaagtcaaacaaacggaaaggatttaacgaaggattgtgggaaatagaaaataacccaggagtaaagtttactggctaccaggcaattcagcaacagagctcttcagaaactgagggagaaggtggaaatactgcagatgcaagcagtgaggaagaaggtgatagagtagaagaagatggaaaaggcaaaagaaagaatgaaaaagcaggctcaaaacggaaaaagtcatatacttcaaagaaatcctctaaacagtcccggaaatctccaggagatgaagatgacaaagactgcaaagaagaggaaaacaaaagcagctctgagggtggagatgcgggcaacgacacaagaaacacaacttcagacttgcagaaaaccagtgaagggacctaactaccataatgaatgctgcatattaagagaaaccacaagaaggttatatgtttggttgtctaatattcttggatttgatatgaaccaacacatagtccttgttgtcattgacagaaccccagtttgtatgtacattattcatattcctctctgttgtgtttcggggggaaaagacattttagccttttttaaaagttactgatttaatttcatgttatttggttgcatgaagttgcccttaaccactaaggattatcaagatttttgcgcagacttatacatgtctaggatccttttatcaaggcagttatgatcatcgttttcctgccttgaccccaccatcatcaaacactcagttaaatataaattaacattttttagatgaccactcaacataatgcttaagaatggaatttcctctctgtgacagaacccaggaattaattcctaaatacataacgttggtatattgaagacgaaattaaaattgtccttcagttttgaggccatgtgtaaagtttaaccatattgtaaaatatctattccgtattagaaatagctagttgacagcttatacttctcaaaattcatattgttatgtacacaaactaagtttctatatgtgaagttagtgagtctttttgtgttactccaaaataaaggcaatgatttatttttttcccagtgccaatacaattttgagctaagcactcaaggtggatactttacattttaaagctggaatcagcaacagccctatgggaaaccagacaaagcattgacttttaaatgtagacttttaaaataaactgttttcttttggaactacaattagaatagttaatattcatccttaaaccattattatgtgtacattattgttgctattgtgataatagagaattttatttatttttatgccagcttatattgtgagaacacatttagtcagtttgggttttatcaatcctgttaatgcttgtccttggaacatctttcgcgtattcacggtttgtagttgaaaagtttactgtaaaaaaatcaaaaacaaaaaaatgtattgtttttacagaataaatttattgggatgtgtactgggagtaagatttgaggttgtaagcaaactaagttagtgtaatttggcttcatatatgtaacgtgaggtattaatgtaattcatatattaaagcaaaaattgttcgcagc

SEQ ID NO: 80 - DNA, 1230 bp, human
catagcaagtctgccatgggccgcggggcccgtgtcccctcggaggccccgggggcaggcgtcgagcgccgctggcttggagccgcgctggtcgccctgtgcctcctccccgcgctggtgctgctggcccggctgggggccccggcggtgccggcctggagcgcagcgcagggagacgtcgctgcgctgggcctctcggcggtgccccccacccgggtcccgggcccactggccccccgcagacgccgctacacactgactccagccaggctgcgctgggaccacctcaacctcacctacaggatcctctccttcccgcggaacctgctgagcccgcgggagacgcggcgggccctagctgccgccttccgcatgtggagcgacgtgtcccccttcagcttccgcgaggtggcccccgagcagcccagcgacctccggataggcttctacccgatcaaccacacggactgcctggtctccgcgctgcaccactgcttcgacggccccacgggggagctggcccacgccttcttccccccgcacggcggcatccacttcgacgacagcgagtactgggtcctgggccccacgcgctacagctggaagaaaggcgtgtggctcacggacctggtgcacgtggcggcccacgagatcggccacgcgctgggcctgatgcactcacaacacggccgggcgctcatgcacctgaacgccacgctgcgcggctggaaggcgttgtcccaggacgagctgtgggggctgcaccggctctacggatgcctcgacaggctgttcgtgtgcgcgtcctgggcgcggaggggcttctgcgacgctcgccggcggctcatgaagaggctctgccccagcagctgcgacttctgctacgaattccccttccccacggtggccaccaccccaccgccccccaggaccaaaaccaggctggtgcccgagggcaggaacgtgaccttccgttgcggccagaagatcctccacaagaaagggaaagtgtactggtacaaggaccaggagcccctggagttctcctaccccggctacctggccctgggcgaggcgcacctgagcatcatcgccaacgccgtcaatgagggcacctacacctgcgtggtgcgccgccagcagcgcgtgctgaccacctactcctggcgagtccgtgtgcggggctgagcccggctgataaagcactttctctctgaaaaaaaaaaaaaa

SEQ ID NO: 81 - DNA, 494 bp, human
cagacagtccgggagcaccagctcgctatcaagcagctggacgccccgctgaggccgtagacgtccaccagggcccagagcgggtcggccgtgcggacccgcatgaagaacagcataacagccgagtcgttgatgcggtggaagacacggcccttcttgtccacccagaatgcgatgatgttgccctcattggcaaactcctcaggcagcgcttggcccagaagccactctgggacaccaggtcggggcaggcgtacttgggcagcgagtcagggtggatgcgggacgggtccttgctggtgaagcccagccgcaggccccgctccagcagcactgcttcttggtgatcttcagcctgacttgctcgtagatgaggaccgggcggttgctgaaggtgatggcgttgcagaagctggcctgcctcttgacagccttgtggctgaggtccatgaggatctgggagccttggtgtgcgggtggaagagcagcgcgtg

SEQ ID NO: 82 - DNA, 3311 bp, human
cgcccgggcaggtgaaaggttttgtctatttctgttccttgttgaatctctagtacctagaaccatgtctggtcctgattaggcacttggtgaatgtttttgaatgaatactctgagctgttctttaatcggtcctcatgatcctcattgtacagatgagggaactctgggcgaacctggcctgggtcttgagctaattacgggtaggtcaggttctgtacccaagtagtacacacagtgatgggcggggtggcctggggccgtggtttgtcaacccctacgctggagggtgatgttttggtacaagaggagaggtgccccaatgcgtcctgtgtctgtaattgatggcgttgtctgtgtttccccaggatgtggttctgagacagtccctgtccctgatggcccacggagcgactcggtggaaggaagtcccttccgtcccccgtcacactccttctctgccgtcttcgatgaagacaagccgatagccagcagtgggacttacaacttggactttgacaacattgagcttgtggatacctttcagaccttggagcctcgtgcctcagacgctaagaatcaggagggcaaagtgaacacacggaggaagtccacggattccgtccccatctctaagtctacactgtcccggtcgctcagcctgcaagccagtgactttgatggtgcttcttcctcaggcaatcccgaggccgtggcccttgccccagatgcatatagcacgggttccagcagtgcttctagtacccttaagcgaactaaaaaaccgaggccgccttccttaaaaaagaaacagaccaccaagaaacccacagagacccccccagtgaaggagacgcaacaggagccagatgaagagagccttgtccccagtggggagaatctagcatctgagacgaaaacggaatctgccaagacggaaggtcctagcccagccttattggaggagacgccccttgagcccgctgtggggcccaaagctgcctgccctctggactcagagagtgcagaaggggttgtccccccggcttctggaggtggcagagtgcagaactcaccccctgtcgggaggaaaacgctgcctcttaccacggccccggaggcaggggaggtaaccccatcggatagcggggggcaagaggactctccagccaaagggctctccgtaaggctggagtttgactattctgaggacaagagtagttgggacaaccagcaggaaaacccccctcctaccaaaaagataggcaaaaagccagttgccaaaatgcccctgaggaggccaaagatgaaaaagacacccgagaaacttgacaacactcctgcctcacctcccagatcccctgctgaacccaatgacatccccattgctaaaggtacttacacctttgatattgacaagtgggatgaccccaattttaaccctttttcttccacctcaaaaatgcaggagtctcccaaactgccccaacaatcatacaactttgacccagacacctgtgatgagtccgttgacccctttaagacatcctctaagacccccagctcaccttctaaatccccagcctcctttgagatcccagccagtgctatggaagccaatggagtggacggggatgggctaaacaagcccgccaagaagaagaagacgcccctaaagactgacacatttagggtgaaaaagtcgccaaaacggtctcctctctctgatccaccttcccaggaccccaccccagctgctacaccagaaacaccaccagtgatctctgcggtggtccacgccacagatgaggaaaagctggcggtcaccaaccagaagtggacgtgcatgacagtggacctagaggctgacaaacaggactacccgcagccctcggacctgtccacctttgtaaacgagaccaaattcagttcacccactgaggagttggattacagaaactcctatgaaattgaatatatggagaaaattggctcctccttacctcaggacgacgatgccccgaagaagcaggccttgtaccttatgtttgacacttctcaggagagccctgtcaagtcatctcccgtccgcatgtcagagtccccgacgccgtgttcagggtcaagttttgaagagactgaagcccttgtgaacactgctgcgaaaaaccagcatcctgtcccacgaggactggcccctaaccaagagtcacacttgcaggtgccagagaaatcctcccagaaggagctggaggccatgggcttgggcaccccttcagaagcgattgaaattagagaggctgctcacccaacagacgtctccatctccaaaacagccttgtactcccgcatcgggaccgctgaggtggagaaacctgcaggccttctgttccagcagcccgacctggactctgccctccagatcgccagagcagagatcataaccaaggagagagaggtctcagaatggaaagataaatatgaagaaagcaggcgggaagtgatggaaatgaggaaaatagtggccgagtatgagaagaccatcgctcagatgatagaggacgaacagagagagaagtcagtctcccaccagacggtgcagcagctggttctggagaaggagcaagccctggccgacctgaactccgtggagaagtctctggccgacctcttcagaagatatgagaagatgaaggaggtcctagaaggcttccgcaagaatgaagaggtgttgaagagatgtgcgcaggagtacctgtcccgggtgaagaaggaggagcagaggtaccaggccctgaaggtgcacgcggaggagaaactggacagggccaatgctgagattgctcaggttcgaggcaaggcccagcaggagcaagccgcccaccaggccagcctgcggaaggagcagctgcgagtggacgccctggaaaggacgctggagcagaagaataaagaaatagaagaactcaccaagatttgtgacgaactgattgccaaaatggggaaaagctaactctgaaccgaatgttttggacttaactgttgcgtgcaatatgaccgtcggcacactgctgttcctccagttccatggacaggttctgttttcactttttcgtatgcactactgtatttcctttctaaataaaattgatttgattgtatgcagtactaaggagactatcagaatttcttgctattggtttgcattttcctagtataattcatagcaagttgacctcagagttcctgtatcagggagattgtctgattctctaataaaagacacattgctgaaaaaaaaaaaaaaaaaa

SEQ ID NO: 83 - DNA, 599 bp, human
  misc_feature (415)..(415): n is a, c, g, or t
ttttttccttcaaaaaatagtttattctgcacatttcctagtaggctctctgcccaccgttccagggtagcagctactcataacttgtctttctctccaaaaccaagagggccttcccaacagaaaaaccttcagttcccaaagcagcatcgattcttcccctcaccccagcaaacctcggggtggaataatgaatcattcaccttctcccacccctcactgccccgccccaccttcatttgccaggactgtcactggctgatggtcagattttgtctttttcaacttggataccctcaagcatcccagcttttggaggcttccctgggcaacctcatgggcttccacattgaccaggcattacattcagcatccttggacaaaccacccatcagagcagtgggttgtggccagntccctccacccccgactccgccccaatggaagaaaccagaggatcacagggccccaggctgtgccgcctgcagagccaggagctgctgggtgcattgcaacgttctccctgagcaaatcggcatggtcaccacagtccagtcctcagtcaccgacagctctgcccctcggggtcagatcccacc

SEQ ID NO: 84 - DNA, 666 bp, human
  misc_feature (517)..(517): n is a, c, g, or t
  misc_feature (555)..(555): n is a, c, g, or t
  misc_feature (635)..(635): n is a, c, g, or t
  misc_feature (638)..(638): n is a, c, g, or t
  misc_feature (663)..(663): n is a, c, g, or t
cggggcgcccgagggcgtggaggccgcggaggccgaggaacaggaggaggcggaggaggagcaggacgaggccgaagagcaggagggcggcggcggcgtgcgcgacgtggggctgtcgagcagcagcggcgactcgaggccgcccgggggctgatggtggccagacgggaagcccgagaagctgaggctgtggtgcaacttgggccgcggctcccgcgggaagcccaggtgcaacgcatcgcgcgtgccaaaggcacgcaggtccccggaggcgccccccgacggcgcgggccgccgctcgtcagcgttgtggatgaagtggcagcgcggcccataggggcagaagccgatggtatgaaaggtgcggcacagctcggtcttgtactttcgattgcaagtcaggctgcgcagctcgtggaagccatgcgcgaactggcacttttcgccgtacttgcacgtgccgctctcctcgaagggccggcacagctcggtcttgtagcgcgtggagttgatctgngagccgccgccccccttctgctgctgctgcaggtgcangaggtgctggctgcgatcgccgttctcgctaaacgagcggtcccggaatttgttctcctttgtgagcaaggctgtgccgncgncccccgacggcttctttagggtgcngta

SEQ ID NO: 85 - DNA, 694 bp, human
  misc_feature (640)..(640): n is a, c, g, or t
  misc_feature (686)..(686): n is a, c, g, or t
ttttttttttttttttttttttttttgagggtatctaggccaatttattcagctggaaatcaatctgtccagggctggaccaggcgcctccccctcgatacagctcctggctgaagaggtcatcaaagcagcagctgtccccaggccagtgtcacgtcactgcgtacagttcctcccgatcgttcttgcaaatctgatagtggcaggggaatttttgcgagcaggcccagggctcggcgggctggtcaggtggcggcagcagcaaggctgcgctcccggccagcaggatgtgccaaatgctgtgggtgtagtagtagttgtcgctagtcatcatggaggtgtagatggcgatgcccacagaggccataaagaccccgggcaggaggtaaaaggcccagcgctgccacaaggtggggtagcactggcgccggtgcccgcagcggtaagcgtatttcaggactgtcttgagccgtgccatgcacaggatggtgacccagatggccgccccggagcccaagaagtcgcagtactgcagcgtgtcgtagctgaggatgcacagcaccgcctccccgggctggtcgcaggcgtggtagaacgtggagaagaacatggtgtaggcgtagaccgaggccttcaccangaaaaatcgccgcactgagaccgcgatgggggccagaaacatgagngtgctaac

SEQ ID NO: 86 - DNA, 3091 bp, human
gggagacccaagcttctagagatccctcgacctcgagatccattgtgctctaaagagcggaccccagcctctgccaggttcggtccgccatcctcgtcccgtcctccgccggcccctgccccgcgcccagggatcctccagctcctttcgcccgcgccctccgttcgctccggacaccatggacaagttttggtggcacgcagcctggggactctgcctcgtgccgctgagcctggcgcagatcgatttgaatataacctgccgctttgcaggtgtattccacgtggagaaaaatggtcgctacagcatctctcggacggaggccgctgacctctgcaaggctttcaatagcaccttgcccacaatggcccagatggagaaagctctgagcatcggatttgagacctgcaggtatgggttcatagaagggcatgtggtgattccccggatccaccccaactccatctgtgcagcaaacaacacaggggtgtacatcctcacatacaacacctcccagtatgacacatattgcttcaatgcttcagctccacctgaagaagattgtacatcagtcacagacctgcccaatgcctttgatggaccaattaccataactattgttaaccgtgatggcacccgctatgtccagaaaggagaatacagaacgaatcctgaagacatctaccccagcaaccctactgatgatgacgtgagcagcggctcctccagtgaaaggagcagcacttcaggaggttacatcttttacaccttttctactgtacaccccatcccagacgaagacagtccctggatcaccgacagcacagacagaatccctgctaccactttgatgagcactagtgctacagcaactgagacagcaaccaagaggcaagaagcctgggattggttttcatggttgtttctaccatcagagtcaaagaatcatcttcacacaacaacacaaatggctggtacgtcttcaaataccatctcagcaggctgggagccaaatgaagaaaatgaagatgaaagagacagacacctcagtttttctggatcaggcattgatgatgatgaagattttatctccagcaccatttcaaccacaccacgggcctttgaccacacaaaacagaaccaggactggacccagtggaacccaagccattcaaatccggaagtgctacttcagacaaccacaaggatgactgatgtagacagaaatggcaccactgcttatgaaggaaactggaacccagaagcacaccctcccctcattcaccatgagcatcatgaggaagaagagaccccacattctacaagcacaatccaggcaactcctagtagtacaacggaagaaacagctacccagaaggaacagtggtttggcaacagatggcatgagggatatcgccaaacacccagagaagactcccattcgacaacagggacagctgcagcctcagctcataccagccatccaatgcaaggaaggacaacaccaagcccagaggacagttcctggactgatttcttcaacccaatctcacaccccatgggacgaggtcatcaagcaggaagaaggatggatatggactccagtcatagtacaacgcttcagcctactgcaaatccaaacacaggtttggtggaaaatttggacaggacaggacctctttcaatgacaacgcagcagagtaattctcagagcttctctacatcacatgaaggcttggaagaagataaagaccatccaacaacttctactctgacatcaagcaataggaatgatgtcacaggtggaagaagagacccaaatcattctgaaggctcaactactttactggaaggttatacctctcattacccacacacgaaggaaagcaggaccttcatcccagtgacctcagctaagactgggtcctttggagttactgcagttactgttggagattccaactctaatgtcaatcgttccttatcaggagaccaagacacattccaccccagtggggggtcccataccactcatggatctgaatcagatggacactcacatgggagtcaagaaggtggagcaaacacaacctctggtcctataaggacaccccaaattccagaatggctgatcatcttggcatccctcttggccttggctttgattcttgcagtttgcattgcagtcaacagtcgaagaaggtgtgggcagaagaaaaagctagtgatcaacagtggcaatggagctgtggaggacagaaagccaagtggactcaacggagaggccagcaagtctcaggaaatggtgcatttggtgaacaaggagtcgtcagaaactccagaccagtttatgacagctgatgagacaaggaacctgcagaatgtggacatgaagattggggtgtaacacctacaccattatcttggaaagaaacaaccgttggaaacataaccattacagggagctgggacacttaacagatgcaatgtgctactgattgtttcattgcgaatcttttttagcataaaattttctactctttttgttttttgtgttttgttctttaaagtcaggtccaatttgtaaaaacagcattgctttgtaaattagggcccaattaataatcagcaagaatttgatcgttcagttccacttggaggccttcatcctcgggtgtgctatggatggcttctaacaaaaactacacatatgtattcctgatcgccaacctttcccccaccagctaaggacatttcccagggttaatagggcctggtccctgggaggaaatttgaatgggtccattttgcccttccatagcctaatccctgggcattgctttccactgaggttggggtgtactagttacacatcttcaacagaccccctctagaaatttttcagatgcttctgggagacaccaaagggtgaagctatttatctgtagtaaactatttatctgtgtttttgaaatattaaaccctggatcagtcctttgatcagtataattttttaaagttactttgtcagaggcacaaaagggtttaaactgattcataataaatatctgtacttcttcgatcttcaaaa

SEQ ID NO: 87 - DNA, 5261 bp, human; identical to SEQ ID NO: 47

SEQ ID NO: 88 - DNA, 1201 bp, human
tmwccrmcccttatttatttaccctaaaaactgtaacaacagaatcatggactgacacaggtaatggctgagccataagcaaatcgagaagtacagaaatgtcccaccccaaacagctgcggagtacacatcacacagggcctctggtcccggccttctcaggtgctctggagtggaggatcctttgagggaactctgaccactcctgtgtgtctacctatgagagcacgccactagggccacctacccccaacctttggccaaaggagttaaaggacctggaacctgtcgtcaacctcagcatcctcatgaccccaggacagacgcagtggaggcagcaggaactctgggcctgtgctgttgcccctgaggtgtctcctgactacgcaaccctgwttccttcccactttcatcccagcaggccctttcttcctgctgacaaaacactggctccctcatgttcttggcacagcagaagtgttctgcacatggtctctacggaggaaagctggtccccctggcccaggcagcacttcctccgtgagcccctgcagtctcctggtgtgtgcttggggagctagggacatggtgtcaaacctccacaaggcactgctacctcagaaagggggaggacctgtyaggcccaggacagcctccctgcacatggagakcaaatctaaacttaggtcaagacccctaccttctccagggatgccaggaccagagaagggcagaggtcaggagggggcatgaggaggccaagtctggggcagcctcctcagaggcaaatctacactgcagccaattcccctccagagaagcccttggaatctcccaggccatttcactacaaacttatgtttgaatcctttattagaaaccatgcaaactttaatacaaaaaatacaagtgcaawaagaatcthtgtgtyaatacagtcccggggattctcctcaytgcagckatcccaaggcytagckgggakgcctytkttgggcttgctwttctccctcccctytccakttagggcwaaagggaacagaaacytcartttcwgtcttttattttaawttcyrkayggattcctaywatygcwgrggtcccttggcaagrggcttwawktctaggtgtgggtgcggykgargaawccactcyggcctttttttttyacytgttttttwttargtgtacaaaaacargg

SEQ ID NO: 89 - DNA, 748 bp, human
  misc_feature (136)..(137): n is a, c, g, or t
gcgacatggtgcgcaagagcggggggcgaaagtacacgtaccgcttcgggggccgcgtgcccagcctagcctatccggactgtgcgggaggcggacggggagcagagacacaataaaaattcccggtcaaacctcnnaaaaaaaaaaaaaaaaaaaaaaaaaaaaaaaaaggggaaaaaaaaaaaaaaaaaaaaaaaaaaaaaaaaaaaaaaaaaaaaaaaaaaaaaaccctggggggggggcccggtcccaaattccccctatagggagtcgtttaaaaattaacgggccggggtttaaaaacgtcggaacgggaaaaaccctggggtaaccaaactaaatcgcttggaagaaaatccccttttcgcaagttggcgtaatagcaaaaagcgcccccccaatcgcccttccaaaaattggcccaccctaaatggcaaagggaaaattgaaacgctaaatatttggtaaaaatccgggtaaaattttgggaaaataacctaatttttaaaccaataggccaaaatcggaaaaaccctttttaaataaaaaaaataaaccgaaatagggttagatggttgtccaagttggaaacaaaatcccattataaaaaacgggaactcaaacgtaaaagggcaaaaaaccgtatataagggaatggcccatacggaaacaatccccctaataaattttttggggtcaaggggcccccttaaatcgaaaccctaaggggacccccatttccttcggg

SEQ ID NO: 90 - DNA, 683 bp, human
tgtccatcctgcaggccacaagctctggatgaggaacttgaggcaagtcaccagcccctgatcatttcgcctaaaagagcaaggactagagttcctgacctccaggccagtccctgatccctgacctaatgttatcgcggaatgatgaggctgccagtgcccagcagtgagggacctgacctcaggggcagagacaagagaggcaccaaggaggatccaagagctgactatgcctgcattgctgagaacaaacccacctgagcaccccagacaccttcctcaacccaggcgggtggacagggtccccctgtggtccagccagtaaaaaccatggtccccccaaaaaaaaaaaaaaaaaaaaaaaaaaaaaaaaaaaaaaaaaaaaaaaaaaaaaaaaaaaataataaaaatattatatttttataataaaacatatttaattttatttttttatactgctataaaaaattaaaataaataaaaattttggccccccttggccccgtttgtttttttctcgggccagttttttcttcgggcccaaatttggagctcctttgcccatttccccttaaggggggcgatttaaattcacgggcggggttttaaaaggggggggtgggaaaacccggggtgtccccccttttttctctgggaaaaaaccccttttgcaagtggtgaaa

SEQ ID NO: 91 - DNA, 2917 bp, human
ggcacgagggcggcggccgcgatgagccttcagcctgccgggcaggggacgtgaacatggatgaccctaagaaggaagacattcttcttttggccgatgaaaaatttgacttcgatctttcattgtcttcttcgagtgcaaatgaagatgatgaagtcttcttcggaccctttggacataaagaaagatgtattgctgccagcttggaattaaataatccggttcccgaacagcctccgttgcccacatctgagagtccctttgcctggagccctctggccggggagaagttcgtggaggtgtacaaagaagctcacttactggctttacacattgagagcagcagccggaaccaggcagcccaagctgccaagcctgaagaccctcggagccagggcgtggaaagattcatacaggagtcaaaattaaaaataaacctctttgagaaagaaaaggaaatgaagaaaagccccacgtctcttaaaagggagacatactacctgtcagacagccccttgctggggccccctgtgggtgagcctcggctcttggcctcctccccggccctgcccagctctggtgcccaggcccgcctcacccgggcgccggggcctccgcactctgctcatgctttgcccagggaatcatgcactgctcatgctgcaagtcaggcagcgactcagaggaagcccgggaccaaattgctgctgcctcgagcggcctctgttagaggaagaagcatccctggggctgcggagaagcccaagaaagagattccagctagtccttccaggacaaaaatcccagctgagaaggaatcccaccgggatgttctccctgacaaacctgccccgggtgctgtcaatgtgccggccgccggaagccacttgggccagggcaagcgggcgatccctgttccaaacaagttggggctgaagaagaccctgttaaaagcacccggctctaccagcaatctcgcaaggaagtcctcctcggggcctgtttggagcggggcatccagtgcgtgcacatccccagcagtgggcaaagctaaatcaagtgaatttgcaagtattcctgcaaatagctcccggcctctgtcaaacatcagcaagtcaggcagaatgggacccgccatgctgcggccagctctgcctgcaggccctgtgggggcatcctcctggcaggccaagcgggtcgatgtttctgagctggcagcggagcagctcacggcacccccctcagcatcccccacccaaccccagactccggaaggtggcggccagtggctgaactccagttgcgcttggtcagaatcttctcaattgaataagactagaagtatcagacggcgagattcctgtctaaattccaagacaaaggttatgcctactcctacaaatcaatttaaaattcctaagttttctattggtgactccccggacagctcaacaccaaagctttcgcgggcacagcggccgcagtcgtgcacgtcagttggcagggtcactgtccacagcaccccggttagacgctcatctgggccagcaccacaaagcctgctgagcgcacggcgtgtgtcagccttgcccacacccgccagccggcgctgctctggccttccaccgatgacccccaaaacgatgcccagggccgtgggctctcccctgtgtgtgccagctcggagacgttcctctgagccccgcaagaactctgcaatgagaactgaaccaacaagggagagcaacagaaagacagattccaggctggtggatgtgtcccctgacaggggttctcctccttcccgtgtgcctcaggcacttaacttttctccagaggaaagcgattctactttctccaaaagtactgccacagaagtagctcgggaggaagccaagccgggtggagatgcagcccctagtgaggctcttcttgtagatatcaaactggaaccactcgcggtcactccagatgctgcaagccagcccctcattgaccttcctctcatcgacttctgcgataccccagaagcacacgtggctgtaggatctgaaagcaggcctctgatcgacctcatgacaaacactccagacatgaataaaaatgtggccaaaccttcaccggtggtgggacagctcatagacctgagctcccctctgatccagctgagccctgaggctgacaaggagaacgtggattccccactcctcaagttctaagccgaaccaaatcctttgccttgaaagaacagccctaaagtggttttcaaccctcagaaacaagctttaggctggtcgcagtggcttacacttgtaaccctagaacttgggaggctgaggtgggcggattacttgagcccaggagttcgggaccagcctgggaaatatagtgaaactcctgtccctacaaaaagtacaaaaattagccgggtgtggtagtgcatgcctgtagtcccagctacttgggaggctgaagtgggaggatggcctgagctcaaggagatgcaggctgcagtgggctgtgattgtgccactgcactccagcctgggcaccaatgtgagaacctgtcttggaaaaaaaaaaaaaaagaaacatgttttagtagaagttttatttgaaaaagaaaaataagcataaatatattcccagtgctggagagggtgggctgagggactggggccagcacggaccacccaaggcctctgcttcccgccgccaccctcctcgctgccattctctgggctggaatgtgaagcctcagtcactctaaatgaagaattttcttttgaatgttttgtatgtaaaatagcaagtggctatttttaaagttaagtttgtataaatagttagatattctagatttacattaaattgtaaaataaatggacttattgaagcataaaaaaaaaaaaaaaaa

SEQ ID NO: 92 - DNA, 1134 bp, human
agcaactacagaaagcttttatttatttgttcaaagtaaccagtgctatggatgcaaaaaacccccaacaactcttccaacgctactttcaaaacaaacatatcaaacttgattttcattaggatgtagttattttgtcacactagtaaatcaaaatctaagacccaatttttatatatatatataaatatatataaaagaacaatgtgaacaattattgagcttcatcttctggacaagaatgccaagttagtctctcttcataaaaagcaattacaatttgaggacacttcatactttgcctctttcgccagcaccaagctctgcctcagtctgaatctttccatttcatgagaaacatcaattctccactgactgtctgtggcaccaattattctatcaggatcaagacctctggcaaatcctcttggtttgtcagcagcatctctttatcttctttgatttgctagtcatcagattcactgtcagataaagatgtctattatatgtaccatctagacacttatgccagctgtctgagagtgaagaaacgcttcaatcaattctggacaatctacatataccttcaggttcccaaagtatcgtcagcatctgtaaaatccgaacacattcagagaaatatacacttgccattcactacacgtcgatctagtactgatccacgacaaatactatcagctctgcgacaaaactactaacgtcattctccgtctggtacaaggccaactacctagacaaagtagaatatagatgggaggacaatgagaataggcggactgtagaagagctaggatacaacgaagtacgaactgacccagggtcacgagatagaaagagccagcgagacaagacagaaatacgggacatactgtcaggatcaacgccaacaggaatacttcgaaaagagtaggacatccacagctagcagagcagacacagacgcgccgacctggagcacagcttatcggcacagagagcaagcgcaatagagcgaataaaaataagggaagaagtaaggataggggccaagcacgaacacggcaccggacactaaccccaccgccgacgcagcacacacagcatagacagagagagagacagctcagtccgacc

SEQ ID NO: 93 - DNA, 544 bp, human
ttttaggttttttactattttattatggcacacaggatagaggatggtacagttttcttacttcaaccaagtaattctcaaagcatccagctatttccatttggctaaagttactttttgcacatagcttgcatctgtttgagacttaccatgtacatcaacccaggtctagtaagcagaaatgtgaaaagttttgtttctgaggagacgcctcatctttacagaagccaatacactgagagccttcatagttccaatccattaccatcatggcaaggaagcactttacctatttgcatagcaacatatatttaactagaaataggtggtacaaagggattaagtaactttaaatggagaccactttggtttcaggttaaattaataacttatagagatcgtctaaaaaacaaatattgaatgaaattagctgacaaagcaattgtttcagaacaaaggcagaatagcagatagtaatatcatctatatttattccacatcaaatgcaagagcgttcttaactttacgacagaaaggatacatg

SEQ ID NO: 94 - DNA, 704 bp, human
  misc_feature (572)..(572): n is a, c, g, or t
ttttagtataatccaaatttattatatctaagaggctatcatgggctgtaagtagaatcaaaggttaagaacattttatgcacttattccacaaacatttactgagcatactaggtgctgggaatgtgacagtgagcaaaaaacacaagagtgtgcaaagagtgatcaaaatgtcaaccagtaagaacagggaagagctgctgaggccaagaggagacgactagttctaaagatgtgtggatttcacagcctggtctctggttttgagcctgattgcaatttgacatgactcttggcttaggaaacggtaatccctaataagacagggatgatattgatgtagaacttgacataagatctctattttcttgaaaagagcacaaggtttgttttaagtcctgaagtagctcaatctcttccttcaactgctgccacctttgttgagatgcatgaatttttttctctattgctgcttgaaaatttacaaatgtgtcttcgaacaatctacagtcaaaaagtgcactcccgatttcttcatagtctgattctgaagtagtctcatccatgagttnttctggaattgaatgaactttgtctaatatttcttcaagtaagtaatttagaagtcctgcttccttgcttttcttaagaaaaagaactttcacagttgcatctgtgtgtctggcatgctcttctttcacttg

SEQ ID NO: 95 - DNA, 402 bp, human
  misc_feature (74)..(74): n is a, c, g, or t
  misc_feature (205)..(205): n is a, c, g, or t
  misc_feature (271)..(271): n is a, c, g, or t
  misc_feature (274)..(274): n is a, c, g, or t
  misc_feature (330)..(330): n is a, c, g, or t
  misc_feature (353)..(353): n is a, c, g, or t
  misc_feature (371)..(371): n is a, c, g, or t
  misc_feature (383)..(383): n is a, c, g, or t
ttttttttttttttttttctttgaatgtttactaagcagtcagaaggtgacttactccattccccagttgcaanccctgaagcatagagggtttagggttaggaggagtaccacagactgaaagaggaagtaagaagttaagggcttggcaaagttgccactcctatccctggtctagctgcctcagaactaaaggaggcctggnactaacaagtcactcccttccagattagatgaggccagctgcttttggatgccccaggaagaggtngtngcaacagtggcatgagggatccctctgtaactccacatgccaggtcatcttcactngattagatgtccatttcaaattntgcgtcatcgggtatctnttcctctgtctnctgcttccttcagcttctt

SEQ ID NO: 96 - DNA, 3473 bp, human
tggggcagaaaagtaatacagacggagcactgcagaaaccttcaaatgaaggtgtcattgaaataaaagcaactaaggtctgtgaccagaggaccaaatgtaaaagtcgctgtaatgaaatgctgccaggcacgtcaacaggcaataatcaaagcactatcactctatcagttgcttctcagaacttaactttcaccagcagcagctcaccacctaatggtgactcaatcaataaagaccctaaattatgcactaaaagcccaagaaaacgactgtcttctacattgcaagagacccaggtgcctcctgtaaagaaaccaattgtggaacagctttcagcagctaccatagaagggcagaaacaaggcagtgttaagaaggaccaaaaggttccacattcagggaaaacagaaggttcaacagcaggtgctcagattcctagcaaggtatcagtaaatgtcagttcacacataggagcaaatcaacccttgaattcctctgcccttgttatcagtgattcagctttggaacagcaaacaaccccatcatcatctccagatataaaagtaaaacttgaaggaagtgtctttctcttggacagtgattcaaagtcagttggcagctttaatccaaatggatggcaacaaatcactaaagattctgagtttatatctgccagttgtgaacaacagcaagatatcagtgttatgacaattcctgagcactctgatatcaatgacttagagaaatctgtttgggaattagaaggaatgccacaggacacatatagccagcagctacatagccagatacaggaatcttctttaaatcaaatacaagcacattcttcagatcagttacctctgcaatctgaactgaaggagtttgagccttctgtttcccagacaaatgaaagctactttccttttgatgatgaacttacacaagatagtattgtggaagagctggtgcttatggagcagcaaatgtcaatgaacaattctcattcttacggcaactgtttgggaatgacccttcagagtcagtcagtaactccaggagctccaatgtcatctcacacttccagcacccacttctatcatccaatccacagcaatggcactccaatccacacacccacacccacacccacacccactcctactccaaccccaaccccaaccccgacatctgaaatgattgctggatctcagagtctgtcacgggagagcccttgctccaggctagcccagactacacctgtggatagtgctttaggaagtagccgacatacacccattggtactccacattctaactgcagcagtagtgtcccccccagccctgttgaatgcaggaatccgtttgcattcactccaataagctccagtatggcatatcatgacgccagcattgtctcaagtagtcctgtgaaaccgatgcaaagacccatggccacacaccctgacaaaaccaagcttgaatggatgaataatgggtatagtggggttggtaattcatcagtttctggccatggtattctcccaagctatcaggaactagtggaagaccgtttcaggaaacctcatgcttttgctgtgcctggacagtcttatcagtctcaatccagacatcatgacactcattttggtcgtttgactcctgtctctcctgtgcagcatcaaggtgccactgtaaataacaccaacaaacaggagggttttgcagtccctgcccctcttgataataaaggaactaattcatctgccagcagcaacttcagatgccggagtgtgagccctgctgttcatcgccaacgtaatcttagtggaagcaccctctatccagtatctaatatcccacgatctaatgtgaccccctttggaagtccagttaccccagaagttcatgttttcacaaatgttcacacagacgcatgtgccaacaacatagctcaaagaagccaatcagttccattgacagtcatgatgcagacagccttcccaaacgctcttcagaagcaagcaaacagtaaaaaaataaccaatgttttgttgagtaaacttgattccgacaatgatgatgcagtgagaggtttgggaatgaacaacctgccctctaattatacagcccggatgaatctcactcagattttggaaccttccactgtttttcctagtgccaacccacaaaatatgatcgattccagcacttctgtttatgagttccaaacaccatcttacctcaccaaaagtaatagcaccggtcagatcaatttttctcctggagataatcaagcacaatcagaaattggagagcaacaattagatttcaatagcactgttaaagacctgttgagtggagacagcttgcaaaccaaccagcagctggtaggtcagggagcatctgatctcactaatactgcatctgatttctctagcgatatcaggttgtcttctgagctctcaggcagcatcaatgatttgaacactttagacccaaatctactgtttgatccaggtcgtcagcagggacaagatgatgaagctacactggaagaattaaagaatgacccattatttcaacaaatttgcagtgaatccatgaattctatgacttcatcaggttttgaatggatagaaagcaaggaccatcctactgttgaaatgttgggttaaattgtgttttataacatgtagcacactgtatctaaagacatatgtattgtatttgtcttaatggaagtgcctcccgcagcagaaatactattaattgtgacattttaaaagcgtttgctgcagaagtggtttcttcagtaggaaatggttagacttgcctcagttcttaacaagtgtctaaagacagtaggctgtagaagaacaagtattaggttttaaattttataatgtgccccatttattcacattgattgactatccagctgttacaagagcagtcgatctttattttgtgtaagttagtttcatttcatcagatgatctgcacagaactcagaataaaccatcaattttaggtataggctgttttgttgttggcattatcttttagatataaaatcatagctagggtgaaccgtagacaagaaagtcttccttgaaacagggataatattcaggttattataaatatttaggcttgaagcatagagctactgtagggtgaaaaatctctgtaggactttctggggcttcagtaccatttacacccacgatgaagggcttaaatagaaaataatggaaaattaaatattactttaaggaaagcaaagctgcactaaaatttttaagggaaaaaaaacaagtagccatttatatttgtgaccttgcattaatatttaaatgttgattttaatatggagctagcacacatagatgcgcaggcacgcacacacaaaacaagcaaatgtaactccaggcatttgtaatttaatataataaatacaagcatgttag

SEQ ID NO: 97 - DNA, 2001 bp, human
agtctgtataaaaagcaattgctcttttgtttccaaaacaggtattacaagtggataaataatgtgcactgctctgagcccaaaggtacgcagtggacctggcctctctgatatgcatcagtatagccaatggctagccagcagacatgaagctaatttgctaccaatgaaagaagatctggccttgtggttaaccaatctattagggaaggagattacagcagaaacttttatggagaagttggacaatggtgccttgctctgtcaacttgcagaaactatgcaggagaaattcaaggagagcatggatgctaacaagcccacaaagaatctaccgttgaagaagatcccatgcaaaaccagtgcaccctcgggctccttttttgccagagacaatacagcaaatttcttatcctggtgccgagatttaggggtggatgaaacgtgtctatttgaatcggaaggtttggtcctccacaagcaacccagagaagtgtgtctctgtctgctagagcttggccggattgcagccaggtatggtgtggagcctcctggtttgataaagctggaaaaagagattgaacaagaagaaacactttctgccccttctccttcaccttctccttcatcaaagtcttctggaaaaaagagtacaggaaacttactggatgatgcagtgaaacgaatttctgaagatcctccttgcaaatgcccaaacaagttctgtgtggagcggctctcccaaggaagataccgagtgggagaaaagatcctcttcattaggatgctgcacaacaaacatgtcatggtccgtgtgggaggaggctgggaaacttttgcagggtatttgttgaaacacgacccctgccgaatgctgcagatctcccgtgtggatggcaaaacatcccctatccaaagcaaatctccaactctaaaggacatgaatccagataactacttggtggtctctgccagttataaggctaagaaggaaattaagtgaaacaaattggtcatgacaaggggaccctcataatggcctgtatccacttctccagtatagtcagtttagttcatatgttctgaaaactgttttggagaaagatagacagaaaaatgtcatcatattgaaaaatgttcaaagagtagcactatttatttttaatgcttctgtagaatatgacctattaaaagaaaatctaaactcaaatttaaattatccaaattttaggcaaattattatttctcaatatgcgaacacagtatttagaacacaatattagaaacacaattctaactaaagataaataaggagaaaacatttaggatttgcagataagtcaacagaaagtgcctgctttacactcatgagtaaaagcactccagacatttttataattgcaagatttttatgctttttttttttttttttacaaaatgatgattagtgtgataatgtgctgcaaaaaatatccaacagcactacacataagtacagagtattcacaatagtaatatgttactggaaaggccacttccgaaaagtttacattcacttggaaggctgccttaaagtatatctcttatctatgaccaaatatctggggtacttttagaagttttcagtacacccccttagagaatagcttatgagttatttcacacattcctgagcacatggctgtgtttagaatgatctagtgtaattcatacatgagctgacatacgttgatactttgacgagtaaattgtacagtcaaatgttcattgatttcatgttatttcaaagcattttcttattaaaaatatatctttagttaatcctattttgctatgctttctagtaaagtaaattcactgtagctaatgatgttacagacttacgtatacccttgtatacctgggacagggctgttttataccaataaacagcaaaatattgtccttactcattcaagaattaaaaggataaattttaaaaatgttaaaaaaaaaaaaaaa

SEQ ID NO: 98 - DNA, 1612 bp, human
cttagacgctccccagatgattctaatgagcagcctggttgagaactacttcacgtggtagcgcctcctgcccagaaccgtgggatatagccctgggcaaaccctcaccaggatcaggcctgtcttccctatgaggtgtaacctatgctccaggctctgtaatgttcccccaggcaagagcttcctcctccagatttaagggtgcccaggctgggagactgtcccctgtctttcccaggtggtcctgtgcttcttgggctcatcacaggaaagacctgtcccaggtgcaaggtctctctgatgtagaaggcctcccctgagatggacagtctgggggatcttcccacgtgaacctgtctcttgctccgcaggtgtaaggtatgcccactgacctttttcaccaagtcagagatgcagatccactccaagtcgcacacagaggccaagccccacaagtgcccgcactgctccaagtcctttgccaacgcctcctacctggcccagcacctgcgcatccacctgggcgtcaagccctaccactgctcctactgtgataagtccttccggcagctctcccacctccagcagcacaccaggtgagtggcctgcctgctgccctgctgcagcccgactcagctcagcacccgtggcctggcacatggagccagtgcaaggaggggcaaggaccttctccaggtgcccattgccctcggggtcacggcccttgtggacctcactggcctcagctgttgttactgcaccccgtccccactgtttctcatctctaggtctttgcacatgctgtgtcctttaccagagagacacccctctcccgcttttccctgtttctctggccatccccttgtcctctctcagtctagcttcctccaggaagccctccctgattgctctagctgggtgagggacccgacctctgtgtccccacagggctctgtgcatgtccatcatagcagtggtaggctgtcacgcccgtgtctctttatctgcccacctcactcaatctactgggagttcttgaaggcaagagctcagtctcctccatttccatatccccagtttgtggcacaaaataagcaattattaaatattttggaataaatataactggtttttacagagcatatgattcatccatttaacaaatacttatagaaacttttactctatgccagacactattctagatgttgaggatacagcaaggaagaaaacagacgaaaatctctgccttcgtggggcatacagtctagttgagtgtgtgaaagggagactcaaagctataaatgctttaagaaaaatttgtggctgggtgcggtggctcacacctgtaatcccagcactttaggaggctgaggcgggtggatcacctgaggtcaggagttcatgaccagcctggccaacgtggcgaaaccccatctctactaaaaatacaaaaattagctgggtgtggtggtgggcgtctgtaatcccagctacttgggaggcttaggcaggagactcgcttgaacccaggagatggaggctgcagtgggccgagattgcgccattgcactccagcctggatgacaagagtgaaactctgtctcaagag

SEQ ID NO: 99 - DNA, 1086 bp, human
atggatcccctgggtgcagccaagccacaatggccatggcgccgctgtctggccgcacggctatttcagctgctggtggctgtgtgtttcttctcctacctgcgtgtgtcccgagacgatgccactggatcccctagggctcccagtgggtcctcccgacaggacaccactcccacccgccccaccctcctgatcctgctatggacatggcctttccacatccctgtggctctgtcccgctgttcagagatggtgcccggcacagccgactgccacatcactgccgaccgcaaggtgtacccacaggcagacacggtcatcgtgcaccactgggatatcatgtccaaccctaagtcacgcctcccaccttccccgaggccgcaggggcagcgctggatctggttcaacttggagccaccccctaactgccagcacctggaagccctggacagatacttcaatctcaccatgtcctaccgcagcgactccgacatcttcacgccctacagctggctggagccgtggtccggccagcctgcccacccaccgctcaacctctcggccaagaccgagctggtggcctgggcggtgtccaactggaagccggactcagccagggtgcgctactaccagagcctgcaggctcatctcaaggtggacgtgtacggacgctcccacaagcccctgcccaaggggaccatgatggagacgctgtcccggtacaagttctacctggccttcgagaactccttgcaccccgactacatcaccgagaagctgtggaggaacgccctggaggcctgggccgtgcccgtggtgctgggccccagcagaagcaactacgagaggttcctgccacccgacgccttcatccacgtggacgacttccagagccccaaggacctggcccggtacctgcaggagctggacaaggaccacgcccgctacctgagctactttcgctggcgggagacgctgcggcctcgctccttcagctgggcactggatttctgcaaggcctgctggaaactgcagcaggaatccaggtaccagacggtgcgcagcatagcggcttggttcacctga

SEQ ID NO: 100 - DNA, 5956 bp, human
atgagttctgactcagaattggctgtttttggggaggctgctcctttcctccgaaagtctgaaagggaacgcattgaggcccagaataggccctttgatgccaaaacatctgtctttgtggcggagcccaaagaatcctttgtcaaagggaccatccagagcagagaaggaggaaaagtgacggtgaagactgagggaggagcgactctgacagtgaaggatgatcaggtcttccccatgaaccctcccaaatatgacaagatcgaggatatggccatgatgactcatctgcatgagcctgctgtgctgtacaacctcaaagaacgttatgcagcctggatgatctacacctattcaggtctcttctgtgtcactgtcaacccctacaagtggctgcctgtgtataagcccgaggtggtgacagcctaccgaggcaaaaagcgccaggaggccccgccccacatcttctccatctctgacaacgcctatcagttcatgctgactgaccgagagaatcagtcaatcctgatcactggagaatctggtgcagggaagactgtgaacaccaagcgtgtcatccagtactttgcaacaattgcagttactggtgagaagaagaaggaagaaattacttctggcaaaatacaggggactctggaagatcaaatcatcagtgccaaccccctactggaggcctttggcaacgccaagaccgtgaggaatgacaactcctctcgctttggtaaattcatcagaatccactttggcactactggaaaactggcatctgctgatattgaaacatatctgctagagaagtctagagttgttttccagcttaaggctgagagaagttatcatattttttaccagattacatcgaataagaaaccagaacttattgaaatgcttctgattaccacgaacccatatgattacccatttgtcagtcaaggggagatcagtgtggccagcatcgatgatcaggaagaactgatggccacagatagtgctattgatattttgggctttactaatgaagaaaaggtctccatttacaagctcacgggggctgtgatgcattatgggaacctaaaatttaagcaaaagcagcgtgaggagcaagcagagccagatggcacagaagttgctgacaaggcggcctacctccagagtctgaactctgcagatctgctcaaagctctctgctaccccagggtcaaggtcggcaatgagtatgtcaccaaaggccagactgtagaacaggtgtccaacgcagtaggtgctctggccaaagccgtctacgagaagatgttcctgtggatggttgcccgcatcaaccagcagctggacaccaagcagcccaggcagtacttcatcggggtcttggacattgctggttttgagatttttgatttcaacagcctggagcagctgtgcatcaatttcaccaatgagaaactgcaacagtttttcaaccaccacatgttcgtgctggagcaggaggagtacaagaaggaaggcatcgagtggacgttcatcgacttcgggatggacctggctgcctgcatcgagctcatcgagaagcctatgggcatcttctccatcctggaagaggagtgcatgttccctaaggcaacagacacctccttcaagaacaagctgtatgaccagcacctgggcaagtctgccaacttccagaagcccaaggtggtcaaaggcaaggccgaggcccacttcgctctgattcactatgctggtgttgtggactacaacattactggctggctggagaagaacaaggaccccctgaatgagaccgtggttggactgtaccagaagtctgcaatgaaaactctagctcagctcttctctggggctcaaactgctgaaggagagggagctggtggaggggccaagaaaggtggtaagaagaagggctcttctttccagacagtgtctgcccttttcagagagaatttgaacaagctgatgaccaacctcaggagtacccatcctcactttgtgaggtgtatcatccccaatgagacaaaaactcctggtgccatggagcatgagcttgtcctccaccagctgaggtgtaacggtgtgctggaaggcatccgcatctgtaggaaaggatttccaagcagaatcctttatgcagacttcaaacagagatacaaggtattaaatgcaagtgcaatccctgaagggcaattcattgatagcaagaaggcctctgagaagctccttgcatccatcgacattgaccacacccagtataaatttgggcacaccaaggtctttttcaaagctggtcttctggggctcctagaggagatgcgagatgacaagctggcccagctgattacccgaacccaggccaggtgcagagggttcttggcaagagtggagtaccagaggatggtggagagaagggaggccatcttctgtatccagtacaatatcagatccttcatgaatgtcaagcactggccctggatgaaactcttcttcaagatcaagcctctgttgaagagtgcagaaactgagaaggagatggccaccatgaaggaagaatttcagaaaattaaagacgaacttgccaagtcagaggcaaaaaggaaggaactggaagaaaagatggtgacgctgttgaaagaaaaaaatgacttgcagctccaagttcaggctgaagccgaaggcttggctgatgcagaggaaaggtgtgaccagctaatcaaaaccaaaatccagctagaagccaaaatcaaagaggtgactgagagagctgaggatgaggaagagatcaatgctgagctgacagccaagaagaggaaactggaggatgaatgttcagaactcaagaaagacattgatgaccttgagctgacactggccaaggttgagaaggagaaacatgccacagaaaacaaggtgaaaaacctcacagaagagatggcaggtctggatgaaaccattgctaagctgaccaaggagaagaaggctctccaggaggcccaccagcagaccctggatgacctgcaggcagaggaggacaaagtcaacaccctgaccaaagctaaaatcaaacttgaacaacaagtggatgatcttgaagggtccttggagcaagaaaagaaacttcgcatggacctagaaagggctaagaggaaacttgagggtgacttgaagttggcccaagaatccataatggacattgaaaatgagaaacagcaacttgatgaaaagctcaaaaagaaagagtttgaaatcagcaatctgcaaagcaagattgaagatgaacaggcacttggcattcaattgcagaagaaaattaaagaattgcaagcccgcattgaggagctggaggaggaaatcgaggcggagcgggcctcccgggccaaagcagagaagcagcgctctgacctctcccgggagctggaggagatcagcgagaggctggaagaagccggtggggccacttcagcccagattgagatgaacaagaagcgggaggctgagttccagaaaatgcgcagggacctggaggaggccaccctacagcatgaagccacagcggccaccctgaggaagaagcatgcagatagtgtggccgagcttggggagcagattgacaacctgcagcgagtgaagcagaagctggagaaggagaagagtgagatgaagatggagattgatgaccttgctagtaatgtagaaacggtctccaaagccaagggaaacctagagaaaatgtgccggactctagaggaccaactgagtgaactgaaatcaaaggaagaggagcagcagcggctgatcaatgacctgactgcgcagagggggcgcctgcagactgaatctggtgagttttcacgccagcttgatgaaaaggaagctctggtgtctcagttatcaagaggcaaacaagcctttactcaacagattgaagaattaaagaggcaacttgaagaggagataaaagccaagaacgccctggcgcatgccctgcagtcttcccgccacgactgtgacctgctgcgggaacagtatgaggaggagcaggaatccaaggccgagctgcagagagcactgtccaaggccaacaccgaggttgcccaatggaggaccaaatacgagacggacgccatccagcgcacagaggagctggaggaggccaagaagaagctggcccagcggctgcaggcagctgaggaacatgtagaagctgtgaacgccaaatgtgcttccctcgaaaagacgaagcagcggctgcagaatgaggtcgaggacctcatgcttgatgtggagaggacaaatgccgcctgtgccgcccttgacaaaaagcaaaggaacttcgataagatcctggcagaatggaaacagaaatgtgaggaaacgcatgctgagcttgaggcctcccagaaggaggcccgttcccttggcactgagctgttcaagataaagaatgcctatgaggaatctttggatcagctagaaaccctgaagcgagagaacaaaaacttacagcaggagatttctgacctcacggaacagattgcagaaggagggaaacgtatccatgaactggagaaaataaagaaacaagtggaacaagaaaagtgtgaacttcaggctgctttagaagaagcagaggcatctcttgaacatgaagagggaaagatcctgcgcatccagcttgagttgaaccaagtcaagtctgaggttgataggaaaattgctgaaaaagatgaggaaattgaccagctgaagagaaaccacattagaatcgtggagtccatgcagagcacgctggatgctgagatcaggagtaggaatgatgccattaggctcaagaagaagatggagggagacctcaatgaaatggaaatccagctgaaccatgccaaccgcatggctgctgaggccctgaggaactacaggaacacccaaggcatcctcaaggatacccagatccacctggatgatgctctccggagccaggaggacctgaaggaacagctggccatggtggagcgcagagccaacctgctgcaggctgagatcgaggagctgcgggccactctggaacagacagagaggagcagaaaaatcgcagaacaggagctcctggatgccagtgagcgtgttcagctactgcacacccagaacaccagcctgatcaacaccaagaagaagctggagacagatatttcccaaatgcaaggagagatggaggacattctccaggaagcccgcaatgcagaagaaaaggccaagaaggccatcactgatgccgccatgatggctgaggagctgaagaaggagcaggacaccagcgcccacctggagcggatgaagaagaacatggagcagaccgtgaaggatctgcagctccgtctggatgaggctgagcagctggccctgaagggtgggaagaagcagatccagaaactggaggccagggtacgggagctggaaggagaggttgagagtgagcaaaagcgtaatgctgaggctgtcaaaggtctgcgcaaacatgagaggcgagtgaaggaactcacttaccagacggaagaagatagaaagaatattctcaggcttcaagatttggtagataaacttcaggcaaaagtgaaatcttataagagacaagctgaggaggctgaggaacaatccaacaccaatctagctaaattccgcaagctccagcatgagctggaggaggccgaggaacgggctgacattgctgagtcccaggtgaacaaactgcgggtgaagagccgggaggttcacacaaaagtcataagtgaagagtgatcatgtcctgatgccatggaatgactgaagacaggcacaaaatgtgacatctttggtcatttccctctgtaattattgtgtattctaccctgttgcaaaggaaataaagcatagggtagtttgcaaacaa

SEQ ID NO: 101 - DNA, 1042 bp, human
tttcctcactgactataaaagaatagagaaggaagggcttcagtgaccggctgcctggctgacttacagcagtcagactctgacaggatcatggctatgatggaggtccaggggggacccagcctgggacagacctgcgtgctgatcgtgatcttcacagtgctcctgcagtctctctgtgtggctgtaacttacgtgtactttaccaacgagctgaagcagatgcaggacaagtactccaaaagtggcattgcttgtttcttaaaagaagatgacagttattgggaccccaatgacgaagagagtatgaacagcccctgctggcaagtcaagtggcaactccgtcagctcgttagaaagatgattttgagaacctctgaggaaaccatttctacagttcaagaaaagcaacaaaatatttctcccctagtgagagaaagaggtcctcagagagtagcagctcacataactgggaccagaggaagaagcaacacattgtcttctccaaactccaagaatgaaaaggctctgggccgcaaaataaactcctgggaatcatcaaggagtgggcattcattcctgagcaacttgcacttgaggaatggtgaactggtcatccatgaaaaagggttttactacatctattcccaaacatactttcgatttcaggaggaaataaaagaaaacacaaagaacgacaaacaaatggtccaatatatttacaaatacacaagttatcctgaccctatattgttgatgaaaagtgctagaaatagttgttggtctaaagatgcagaatatggactctattccatctatcaagggggaatatttgagcttaaggaaaatgacagaatttttgtttctgtaacaaatgagcacttgatagacatggaccatgaagccagttttttcggggcctttttagttggctaactgacctggaaagaaaaagcaataacctcaaagtgactattcagttttcaggatgatacactatgaagatgtttcaaaaaatctgaccaaaacaaacaaacagaaa

SEQ ID NO: 102 - DNA, 969 bp, human
agggtggtactgaggcttcagcgggtgccgcccgcctagagggagtggagcgagagcctacgactagatttgcatctttacgtcctgcgcggaggctgctacacacatgcagaagtcatgctggtggcctggacattgaagggagagaagtggatttgggagacatttaggagatggcaccgaaagcgaaggaagctcctgctcctcctaaagccgaagccaaagcaaaggctttaaaggccaagaaggcagtgttgaaaggtgtccgcagccacacgcaaaaaagaggatccgcatgtcactcaccttcaggcggcccaagacactgcgactccggaggcagcccagatatcctcagaagagcacccccaggagaaacaagcttggccactatgctatcatcaagtttccgctgaccactgagtcggccgtgaagaagatagaagaaaacaacacgcttgtgttcactgtggatgttaaagccaacaagcaccagatcagacaggctgtgaagaagctctatgacagtgatgtggccaaggtcaccaccctgatttgtcctgataaagagaagaaggcatatgttcgacttgctcctgattatgatgctttcaatgttgtaacaaaattgggatcacctaaactgagtccagctggctaactctaaatatatgtgtatcttttcagcataaaaaataatgtttttcataagaatgacaacttaattagaatcaaatctataagctttaagattttacgtttctagtaagtataatattagcttatttgactagaactcaagcagaataggaatttatgcttgttttatattcaataatgataattttgaagatatagttgttttattacaccaaaaatactatattaatcttatttaactaagttttatccaaatcatgttaacttaagaaacatttgatcagttcctataaaaaaaaaaaaaaaaaa

SEQ ID NO: 103 - DNA, 2000 bp, human
gcgcccagaacgccccggccatgggcatccgaggcatgctgcgagccgcagtgatcctgctgctcatcaggacctggctcgcggagggcaactaccccagtcccatcccgaaattccacttcgagttctcctctgctgtgcccgaagtcgtcctgaacctcttcaactgcaaaaattgtgcaaatgaagctgtggttcaaaagattttggacagggtgctgtcaagatacgatgtccgcctgagaccgaattttggaggtgcccctgtgcctgtgagaatatctatttatgtcacgagcattgaacagatctcagaaatgaatatggactacacgatcacgatgttttttcatcagacttggaaagattcacgcttagcatactatgagaccaccctgaacttgaccctggactatcggatgcatgagaagttgtgggtccctgactgctactttctgaacagcaaggatgctttcgtgcatgatgtgactgtggagaatcgcgtgtttcagcttcacccagatggaacggtgcggtacggcatccgactcaccactacagcagcttgttccctggatctgcataaattccctatggacaagcaggcctgcaacctggtggtagagagctatggttacacggttgaagacatcatattattctgggatgacaatgggaacgccatccacatgactgaggagctgcatatccctcagttcactttcctgggaaggacgattactagcaaggaggtgtatttctacacaggttcctacatacgcctgatactgaagttccaggttcagagggaagttaacagctaccttgtgcaagtctactggcctactgtcctcaccactattacctcttggatatcgttttggatgaactatgattcctctgcagccagggtgacaattggcttaacttcaatgctcatcctgaccaccatcgactcacatctgcgggataagctccccaacatttcctgtatcaaggccattgatatctatatcctcgtgtgcttgttctttgtgttcctgtccttgctggagtatgtctacatcaactatcttttctacagtcgaggacctcggcgccagcctaggcgacacaggagaccccgaagagtcattgcccgctaccgctaccagcaagtggtggtaggaaacgtgcaggatggcctgattaacgtggaagacggagtcagctctctccccatcaccccagcgcaggcccccctggcaagcccggaaagcctcggttctttgacgtccacctccgagcaggcccagctggccacctcggaaagcctcagcccactcacttctctctcaggccaggcccccctggccactggagaaagcctgagcgatctcccctccacctcagagcaggcccggcacagctatggtgttcgctttaatggtttccaggctgatgacagtattattcctaccgaaatccgcaaccgtgtcgaagcccatggccatggtgttacccatgaccatgaagattccaatgagagcttgagctcggatgagcgccatggccatggccccagtgggaagcccatgcttcaccatggcgagaagggtgtgcaagaagcaggctgggaccttgatgacaacaatgacaagagcgactgccttgccattaaggagcaattcaagtgtgatactaacagtacctggggccttaatgatgatgagctcatggcccatggccaagagaaggacagtagctcagagtctgaggatagttgccccccaagccctgggtgctccttcactgaagggttctccttcgatctctttaatcctgactacgtcccaaaggtcgacaagtggtcccggttcctcttccctctggcctttgggttgttcaacattgtttactgggtataccatatgtattagtcccccagtgctccagaacagcgggagcactgtgctgtgctcctttcagtttcttttgggtttgtttttccctctttcctt

SEQ ID NO: 104 - DNA, 5468 bp, human
cgcccgcccagccccgggggcagggaaagcctaaattacggaattaccgcgagcaaggagcgcggaatcggggagcgtccggagctagctggatcctctaggcaggatggtgatgggaatctttgcaaattgtatcttctgtttgaaagtgaagtacttacctcagcagcagaagaaaaagctacaaactgacattaaggaaaatggcggaaagttttccttttcgttaaatcctcagtgcacacatataatcttagataatgctgatgttctgagtcagtaccaactgaattctatccaaaagaaccacgttcatattgcaaacccagattttatatggaaatctatcagagaaaagagactcttggatgtaaagaattatgatccttataagcccctggacatcacaccacctcctgatcagaaggcgagcagttctgaagtgaaaacagaaggtctatgcccggacagtgccacagaggaggaagacactgtggaactcactgagtttggtatgcagaatgttgaaattcctcatcttcctcaagattttgaagttgcaaaatataacaccttggagaaagtgggaatggagggaggccaggaagctgtggtggtggagcttcagtgttcgcgggactccagggactgtcctttcctgatatcctcacacttcctcctggatgatggcatggagactagaagacagtttgctataaagaaaacctctgaagatgcaagtgaatactttgaaaattacattgaagaactgaagaaacaaggatttctactaagagaacatttcacacctgaagcaacccaattagcatctgaacaattgcaagcattgcttttggaggaagtcatgaattcaagcactctgagccaagaggtgagcgatttagtagagatgatttgggcagaggccctgggccacctggaacacatgcttctcaagccagtgaacaggattagcctcaacgatgtgagcaaggcagaggggattctccttctagtaaaggcagcactgaaaaatggagaaacagcagagcaattgcaaaagatgatgacagagttttacagactgatacctcacaaaggcacaatgcccaaagaagtgaacctgggactattggctaagaaagcagacctctgccagctaataagagacatggttaatgtctgtgaaactaatttgtccaaacccaacccaccatccctggccaaataccgagctttgaggtgcaaaattgagcatgttgaacagaatactgaagaatttctcagggttagaaaagaggttttgcagaatcatcacagtaagagcccagtggatgtcttgcagatatttagagttggcagagtgaatgaaaccacagagtttttgagcaaacttggtaatgtgaggcccttgttgcatggttctcctgtacaaaacatcgtgggaatcttgtgtcgagggttgcttttacccaaagtagtggaagatcgtggtgtgcaaagaacagacgtcggaaaccttggaagtgggatttatttcagtgattcgctcagtacaagtatcaagtactcacacccgggagagacagatggcaccagactcctgctcatttgtgacgtagccctcggaaagtgtatggacttacatgagaaggacttttccttaactgaagcaccaccaggctacgacagtgtgcatggagtttcacaaacagcctctgtcaccacagactttgaggatgatgaatttgttgtctataaaaccaatcaggttaaaatgaaatatattattaaattttccatgcctggagatcagataaaggactttcatcctagtgatcatactgaattagaggaatacagacctgagttttcaaatttttcaaaggttgaagattaccagttaccagatgccaaaacttccagcagcaccaaggccggcctccaggatgcttctgggaacttggttcctctggaggatgtccacatcaaagggagaatcatagacactgtagcccaggtcattgtttttcagacatacacaaataaaagtcacgtgcccattgaggcaaaatatatctttcctttggatgacaaggccgctgtgtgtggcttcgaagccttcatcaatgggaagcacatagttggagagattaaagagaaggaagaagcccagcaagagtacctagaagccgtgacccagggccatggcgcttacctgatgagtcaggatgctccggacgtttttactgtaagtgttggaaacttaccccctaaggctaaggttcttataaaaattacctacatcacagaactcagcatcctgggcactgttggtgtctttttcatgcccgccaccgtagcaccctggcaacaggacaaggctttgaatgaaaaccttcaggatacagtagagaagatttgtataaaagaaataggaacaaagcaaagcttctctttgactatgtctattgagatgccgtacgtgattgaattcattttcagtgatactcatgaactgaaacaaaagcgcacagactgcaaagctgtcattagcaccatggaaggcagctccttagacagcagtggattttctctccacatcggtttgtctgctgcctatctcccaagaatgtgggttgaaaaacatccagaaaaagaaagcgaggcttgcatgcttgtctttcaacccgatctcgatgtcgacctccctgacctagccaatgagagcgaagtgattatttgtcttgactgctccagttccatggagggtgtgacattcttgcaagccaaggaaatcgccttgcatgcgctgtccttggtgggtgagaagcagaaagtaaatattatccagttcggcacaggttacaaggagctattttcgtatcctaagcatatcacaagcaataccgcggcagcagagttcatcatgtctgccacacctaccatggggaacacagacttctggaaaacactccgatatcttagcttattgtaccctgctcgagggtcacggaacatcctcctggtgtctgatgggcacctccaggatgagagcctgacattacagctcgtgaagaggagccgcccgcacaccaggttattcgcctgcggtatcggttctacagcaaatcgtcacgtcttaaggattttgtcccagtgtggtgccggagtatttgaatattttaatgcaaaatccaagcatagttggagaaaacagatagaagaccaaatgaccaggctatgttctccgagttgccactctgtctccgtcaaatggcagcaactcaatccagatgcgcccgaggccctgcaggccccagcccaggtgccatccttgtttcgcaatgatcgactccttgtctatggattcattcctcactgcacacaggcaactctgtgtgcactaattcaagagaaagaattttgtacaatggtgtcgactactgagcttcagaagacaactggaactatgatccacaagctggcagcccgagctctaatcagagattatgaagatggcattcttcacgaaaatgaaaccagtcatgagatgaaaaaacaaaccttgaaatctctgattattaaactcagtaaagaaaactctctcataacacaatttacaagctttgtggcagttgagaaaagggatgagaatgagtcaccttttcctgatattccaaaagtttctgaacttattgccaaagaagatgtagacttcctgccctacatgagctggcagggggaaccccaagaagccgtcaggaaccagtctcttttagcatcctctgagtggccagaattacgtttatccaaacgaaaacataggaaaattccattttccaaaagaaaaatggaattatctcagccagaagtttctgaagattttgaagaggatgccttaggtgtactaccagctttcacatcaaatttggaacgtggacgtgtggaaaagctattggatttaagttggacagagtcatgtaaaccaacagcaactgaaccactatttaagaaagtcagtccatgggaaacatctacttctagcttttttcctattttggctccggccgttggttcctatcttaccccgactacccgcgctcacagtcctgcttccttgtcttttgcctcatatcgtcaggtagctagtttcggttcagctgctcctcccagacagtttgatgcatctcaattcagccaaggccctgtgcctggcacttgtgctgactggatcccacagtcggcgtcttgtcccacaggacctccccagaacccaccttctgcaccctattgtggcattgttttttcagggagctcattaagctctgcacagtctgctccactgcaacatcctggaggctttactaccaggccttctgctggcaccttccctgagctggattctccccagcttcatttctctcttcctacagaccctgatcccatcagaggttttgggtcttatcatccctctgcttactctccttttcattttcaaccttccgcagcctctttgactgccaaccttaggctgccaatggcctctgctttacctgaggctctttgcagtcagtcccggactaccccagtagatctctgtcttctagaagaatcagtaggcagtctcgaaggaagtcgatgtcctgtctttgcttttcaaagttctgacacagaaagtgatgagctatcagaagtacttcaagacagctgctttttacaaataaaatgtgatacaaaagatgacagtatcccgtgctttctggaagtaaaagaagaggatgaaatagtgtgcacacaacactggcaggatgctgtgccttggacagaactcctcagtctacagacagaggatggcttctggaaacttacaccagaactgggacttatattaaatcttaatacaaatggtttgcacagctttcttaaacaaaaaggcattcaatctctaggtgtaaaaggaagagaatgtctcctggacctaattgccacaatgctggtactacagtttattcgcaccaggttggaaaaagagggaatagtgttcaaatcactgatgaaaatggatgacccttctatttccaggaatattccctgggcttttgaggcaataaagcaagcaagtgaatgggtaagaagaactgaaggacagtacccatctatctgcccacggcttgaactggggaacgactgggactctgccaccaagcagttgctgggactccagcccataagcactgtgtcccctcttcatagagtcctccattacagtcaaggctaagtcaaatgaaactgaattttaaactttttgcatgcttctatgtagaaaataatcaaatgataatagatacttataatgaaacttcattaaggtttcattcagtgtagcaattactgtctttaaaaattaagtggaagaagaattactttaatcaactaacaagcaataataaaatgaaacttaaaat

SEQ ID NO: 105 - DNA, 902 bp, human
gggggggagcggggaaaacaaaaggagacgaaggacgcatgcgtttggtgagtcccggattctggtgggttcttccgctcaggctgggtgaagcgcttccgggtcgccgccggcagcagcctcccggcgcgatgaagacactgaggctcagagaggttaagtgactcagccaaggtcaaacagctagtaagtggtggagccaggactcaaagccagtctaggagccatgtccactttgttcccctcactcttccctcgtgtgactgagactctgtggtttaatctggatcgaccctgtgtggaagagacagagctgcagcagcaggaacagcagcatcaggcctggctccaaagcatcgcggagaaagacaacaacctggttcctattggcaagccagcctcagagcactatgatgacgaggaagaagaggatgatgaagatgatgaggatagtgaagaggactcagaggatgatgaggatatgcaggacatggacgagatgaatgactacaatgagtcaccggatgatggagaggtcaatgaggtggacatggaaggcaacgaacaggatcaggaccagtggatgatctaggtagacaaggcagggtggcctcagggagattccaggccagcccaaactaccctgcatcccaacccccaacccctgcccacagaaccagctgatggccccagtgcctgaaagtgcccttgggcacctcctcagctgctgccaggatctggtctctttggcccctcccaggccatcagtctgcacttgaaatccccagggcctgaaacctactccaccttcctggccagtacctcaccccttgattgccaggtctggtctaagtttctttaataaagacaaaggagtgattttcaaaaaaaaaaaaaaaaaa

SEQ ID NO: 106 - DNA, 2039 bp, human
aatgacatgacagccattccgtggccagggacaccactgcccaagctggagaccacgaggattcagggactgaagccagcatgggaattcctggtttgagatcagagtcctgagtacctcgtgggaacttgggcactcatccgcaggaggtctagacccccagagaattccttgagtctaaggcacaggcccaacatgtgtagcaccagtgggtgtgacctggaagaaatccccctagatgatgatgacctaaacaccatagaattcaaaatcctcgcctactacaccagacatcatgtcttcaagagcacccctgctctcttctcaccaaagctgctgagaacaagaagtttgtcccagaggggcctggggaattgttcagcaaatgagtcatggacagaggtgtcatggccttgcagaaattcccaatccagtgagaaggccataaaccttggcaagaaaaagtcttcttggaaagcattctttggagtagtggagaaggaagattcgcagagcacgcctgccaaggtctctgctcagggtcaaaggacgttggaataccaagattcgcacagccagcagtggtccaggtgtctttctaacgtggagcagtgcttggagcatgaagctgtggaccccaaagtcatttccattgccaaccgagtagctgaaattgtttactcctggccaccaccacaagcgacccaggcaggaggcttcaagtccaaagagatttttgtaactgagggtctctccttccagctccaaggccacgtgcctgtagcttcaagttctaagaaagatgaagaagaacaaatactagccaaaattgttgagctgctgaaatattcaggagatcagttggaaagaaaggacactgccttcatccccattcccttggttgacaccagcatccagggttttccacaggatggtttgatggcctgcatttgagctaaagaatgaacttctgtctgcctcgtggagccaagctactgtactgagtgcttattcttttgtacacagctgaagaaagataaggctttgatgggccacttccaggatgggctgtcctactctgttttcaagaccatcacagaccaggtcctaatgggtgtggaccccaggggagaatcagaggtcaaagctcagggctttaaggctgcccttgtaatagacgtcacggccaagctcacagctattgacaaccacccgatgaacagggtcctgggctttggcaccaagtacctgaaagagaacttctcgccatggatccagcagcacggtggatgggaaaaaatacttgggatatcacatgaagaagtagactgaaatatcagatttgtcatcaggaatactctttgtctactgtggtcctgtgcacgttggcctcagatggactacaggagattacaacgtacaaggcagatggagcattgacgttttcaaaaccattattcctgtgactggagaggcatcaggagaggtctcgttcgtctccagctcataaaatgtagcagcatcatccttgacagtgatgtttttcaggccctccattgagaacctgaggaaatctgtaaagataagtggtgatgttgtttcaaacgttcagaacagataccatcatcctgcctttgttagctgctgtagggaaagtgcgttacagatgtctgctgacctcacaagagtgaaaagataaactgtgcatgtgtttccacttccgtttctagtactatttatttttaaactacacttggggtggcctaatacctaggaagatgttgctattcacgttagtaaacagcctaaagaaactcttaggtttactgctacatccatttgtttggagaggtaactgttgtctgtgcctttttgaaaaacttccatttggtacaaaatttttactccaacaccccctcaacccttttctcagggaccacacctcttcttcccaaggtccctgggacttcctcattctttgtggtagtacaatgattggtagcaggtaaaataaatacatagaaagactactgtcaaaa

SEQ ID NO: 107 - DNA, 2030 bp, human
gtccgttaggacgtgttgccctttctgtgtaagctgtgagcgtaggcggccctgagcgggtgtgttgcaggggtttccaagcccagcaccagcacccttgcccttttccatcaggggttcagcctagggtccccgctggtgggcggctcccgagtcttggagaagagcacgagaacctagaccgcccccgaagtgcggagaccccctgggcaggctgaaagatggcggcggcgtctgtctctgcggcttctggttctcacttgtcgaacagctttgctgagccatcaaggtctaatggaagcatggttcggcattcttcatctccatatgtagtatatccttcggataagcctttccttaatagtgatctacgacgctccccaagtaagcctacacttgcctatccagaaagcaacagcagagccatattttctgctcttaagaatcttcaagataagattcgacgcttggaacttgagaggattcaggcagaagaaagtgtgaaaaccttgtctagagaaacaattgaatataagaaagtactggatgaacagatacaagaaagggagaattcaaagaatgaggaatcaaagcacaatcaagaactgacatctcagttgttagctgcagaaaataaatgcaatctattagaaaaacaattggaatacatgcgaaatatgataaagcatgccgaaatggagaggacatctgtcttagagaaacaagtttccctagaaagagaacgacaacatgatcaaacacatgttcagagccaacttgaaaaattggatcttcttgaacaggagtataacaaacttaccacaatgcaggcccttgcagaaaaaaaaatgcaagagttggaagcaaaactccatgaagaagaacaggaaaggaaacgcatgcaagctaaggcagctgagttgcagactggtctagaaacaaatagacttatctttgaagataaggcaactccgtgtgttcccaatgcaagaagaattaaaaaaaagaagtcaaaaccaccagaaaagaaaagttctaggaactattttggtgcacaaccacattatagattatgcttgggtgatatgccatttgtagctgggaagtccacaagccctagccatgccgtggtagccaatgttcagcttgtcttgcatctaatgaagcaacacagtaaagctttgtgcaatgatcgagtcatcaacagtattcctttggcaaagcaagtatcttcacgaggtggtaaaagtaagaagttgtcagtaacacctccctcctccaacggtattaatgaggagttgtcagaagtcttacagactttacaggatgaatttgggcaaatgagctttgatcaccagcagcttgcaaaacttatccaggagtcgccaaccgttgaactgaaagacaagttggagtgtgaattggaggcattagtgggaaggatggaagcaaaagccaaccaaataactaaagttcgaaaataccaagcccagctggagaaacagaagttagagaagcagaagaaggaattaaaagctaccaaaaagactcttgatgaagaaagaaacagcagcagccgttctggaatcacagggaccacaaataagaaagattttatgaaactgagacctggagaaaaaaggagaaaaaatcttcagttattgaaggacatgcaaagcatacagaattcattacaaagcagtagtttgtgttgggattactgactcataaccaggtcagaaattttattcagataatctgtacctcatcaatcagatgatgacaatttacttcccaggtctcatactcacttatgttggaattaattaatagcaggtgttaaaggacccaggcttcattacacaggcttttcatgtatgcaggatgactcaatgttaaagcatttaaatggaaaccaggggagttttaaagcccgagaaaccacacataatcttttgttgagatgagtttgctgtactgacgctgcactttgtaaacagattaccagttttttaaaaaaaaaaaaaaaa

SEQ ID NO: 108 - DNA, 57759 bp, human
ccgagtgtgatggtgccctcttggagtcccagctactcaggaggctaaggcgggaagatcatttaagcccaggagatggaggctgcagtgagctgtgatctaccactgcattccagcctgggtgacagagcaagaccctgtctaaaaaaaaaaaaaagaaaaaaaagaaaagaaaagaatgagtgggagggcgaggcgcggtggctcacgcctgtaatcccagcactttgggagtgggaggtgggtggattacctgaggtcgggagttcgagctcagcctggctaacatggtgaaaccccgtctctactaaatacacaaaattagctgggcgtggtggcacacgcctgtaatcccagctactccggaggctgaggcaggagaatcgcttgaacccaggaggcggaggttgcagtgagccgggattgtgccactgcactccaacctgggcgacagtgagactccgtctcaaaaaaaaaatgaagtactggtacctgcaacagacacaaaagccacatattatatgattccctgtgtgtgaaatgtccagaagaggcaaatccatagagctgacaagtagaatggtgattaccaagagcttaggagaggaagggctaatggccttgaggttctttttaaggtgatgagcatgtttatttggagacagagtctcgttgtgttgcccaggctggagtgcagtggtgtgttcacagctcactgcagcctcaacctcctaggctcaagtgctcctgccatctcagcctcccgagcagcttggaccacagggctgaaccatcacccccagctaattttttctgttttttgtaaaggcaaggtctcacaaaatcccaacatgctgggattacaggcgtgagccaccatgcctggcccctactcattcttttttttttttaagatggagtcttgctgtgtcacccaggctggagtgcagtggcacaatcttggctcactgcaacctccacctcctgagttcaagcaattctccctgcctcagcctcccgagtacctgggattacaggcgcctgccaccacgcccagctaatttttgtatttttagtagagatggcgtttcaccatgttggccaggttggtctcgaaatcctgacctcaggtgatccacccaccttggcctcccaaagtgctgggattacaggcatgagccaccgcgcccagccgcccctactcattcttaatcacaccacctgactttctccacattgatcacattaggatattatcttgtttatttacagaaaatctgtgtccctcttcagtgcactggactcttcggtgcactggatgctcaatgcaggcactaagttttgtctgacttaccactggttgtatgccctgctcacagctggtgaatgagtgattggaaacacacctgctcccttgatttaggcctctgggaaacaagggcaaggtaagttcaggaagaagaaagacctcgtaatttccaggtaggaaaaatcctttggtgtggccgtgagacactgcattcttcttggccacagctccctctgctttgagaatcacataatcaactttatctttctctgaatcgttcacataaaagggaggtgttggaacacaaggtggaaatgggtgtgttggcggtggctgaggaagtcggggcaggaggagccactgtttctgggaatgaattcctgaaacttgctggtcccaccaagatgcaaatcttgcggcagtttttacagttatcctgtggaagaagtgaggatcccactccaagcccaggtcagaatgctgataatcccctctgatcaggtttttttaattttatttttattttttgtggtttggggaagatttgccaactgtatcctcttttctggcaaggaaaatttatatctgcccaatgaaatcaggaatttaacttcattcattcaacagttatttaattctatcctctactagattcctacagctgctgtaaccctaaagtaccacaaactgggtggcttgaaacaacagacacgtagccaggcgcagtggctcacgcctgtaatcccagcactttgggaggctgaggtgggcagatcatctgaggtcaggagttcaagaccagcctggccaaaacggtgaaaccctgtctctgctaaaaatacaaaaaaaattagccgggcatggtggtggcgcacggctgccattccagctactcggaatgctgaggcaggagaaccgcttgaacctgtgaggcggaggttgcagtgagagcgagactctatctcaaaaaaacaaaacaaaaaaccccaacaacaacagacatgtatcctctcacggttctggaggccagaagtctcaaatcaaacgattagcagggccatgttctccctccacaggctcttggggagaatgtttctctgcctttctcttcgctgctggtgttgctggcagctcttggcactttttgggtgtaggctcatcactccagcacctgccctggggtcacatggctctctcctcactgtgcctcttctttttttatttttgagacagggtctcattctgtggcccaggctggagtgcagtggcacagtctcagctcactgcaacctcctcctccccaggctcaagtgatcctcctacgtcagcctcccaagaagctgggacttcaggctcatgccaccaagcccggctaatgttttgtatttttagtagagagagcagtttaccatgttgcctaggctagtctcgaatacctgagttcaagtgatctacttgtctcagcctcccacagtgctgagattacaggtgtgagccactgggccgggccctcctctttttttaaaaaaacaaaacaaaacaaaaacatttattttaagttcaggggtacatgtgcagctttgttatacaggtaaacttgtgtcacgggggtttgttttacagattattaatttcatcacccaggtattaagctagtatccattagttattttttcttttttgttttttttttttttttgagacagagtttcactcttgttgcccaggctggagtgcaatggtgccatctcggatcactgcaacctccgcctcccgggttcaagtgattctcctgtctcagcctcccgagtagctgggattacaggcatgagccaccgtggccagcctagttattttttctgatcgtctccttcctcccaccctccacccttggccagaccccaatgtgtgttgttcccctctatgtgtccatgtgttctcatcatttagctcccatttgtgagaatatgcagtatttggttttctgttcctgcattagtttgctaaggataatgacttctagctccatccatgtccctgcaaaggacatgatatcattcctttttatggctgcatggtattccatggtctatatgtagcacattttctttatccagtctatcactgatgggcattgaggttgattccatgtctttgctattgcgaatagtgctgcagtccttttcttctaaggataccggtcatattagattatgggtccactctcatccagtataacctcatcttaaatgatatcttaattatatcttcaaagaagtaaggtcacactcacaggtactggggttaggacttcaacataggttttttgggggaaactattcaatgcctaacacaacctctccaagaaaaaaatcttactgaaattttaattggaattgtattcaatttatatcataattgggggattttgacttttgtgttttttttttttttttttttttgagacagagtctcgctctgtcgcccaggctggagtgcagtggcacgatctcagctcactacaacctctgcctcctgggttcatgccattctcctgcctcagcctcccatgtagctgggattacaggtgcccgccaccatgcctggctaatttttgtatttttagcagagacggggtttcaccatgttggtcaggctggtctcaaactcctgacctcaggtgaactgcacgcctcagccttccaaagtgctgggattacatgcgtgagccaccatgcccggcaactttttctttttctttttctttttctttttttttctttttttttttttgagatggcgtcttgctctgtcacccagactggagggtagtggcgccatctcagctcactgcaacatctgcccccccgggttcaagcgattctcctgcctcagcctccaagtagctgggattataggcacccgccaccatgcctggctaatttttgtatttttagtagagatggggttttgccatgttggccaggctgatctcgaactcctgacctcaggtgattcacccactccgcctcccaaagtgctaggattacaggcatgagccattgcgcccagccaaatttatttctaagtgtttcatagtttttgtctgcatgctgaatgaaaatgtttcttatttaaatttctaggtgtttattgctacagtgtgagaaaactattgtgtggttttttttgtttgttttttgtttttttttaagatggagtcttgctctatcgcccaggctggagggcagtggcttgttctgggctcactgcaacctccgcctcctgggttcaagtgattctcctgcttcagcctcactagtagctgggattacaggtacccaccaccaggcctgtctaatttttgtatttttcgtagagatggggttttgctatgttggccaggctggtctggaattcctgacctcaggcgatccacccacctccgcctcccaaagtgctggcattacagaagtgagccaccacgcccagccttgtttgatgtatatttatcctgagactagccatctaaccaaactttcttatttattccagtgttttgaaaaaataactagtatgttttgagttttctaagcacacagtcctataaatagagaaatgattgaatgttgcatcttagaatattttgcaggataggaaaaataacctagggctatctatcagctggccatgacagctttccacaaggtagtgttaactaaggaaagcaagatgtaagaaagaatgcttaatataatctcagttttgaaaaacaatgagtgggccgggtgcggtggctctgccctgtaatcccagcattttgggaggctgaggccagcggatcacgaggtcaggggtttgagaccagcctggccaacatggtgaaaccccgtctcttctaaaaatacaaaaattagctggtgtggtggcacgctcctgtagccccagctacttgggaggctgaggcaagagaatcacttgaacctggcaggcggaggttgcagtgagccaagctgcaccgttgcactccagcctgagcgacagagcaggactctgtctcaaaaaaaaaaaaaaaaaaaatcagtaaaaggcaatatgtgtgtattaggatatatggttttttctttggtttttttgtttttgttttgttttttgagacagagtttcgctctcgttgctcaggctggagtgcgatgcgcaatctcggctcactgcaacctcccgctcccgggttcaaacgattctcctgcctcagcctccctagtagctgggattacaggcatgcaccaccacgcccagctaattttttgtatttttagtagagacagggttttgccatgtttgtcaggctggtcttgaactcctgacctcaggtaatccgctcacctcggcctcccaaagtgctgggattacaggagtgagccactgcactcggccaggatatatgttttgtatatgatttcacattcatagagaaaatacagaattttaggttaacatgagccactttgtgtaggtggggaactaacatgggggcagaaaggagaagagaaggagataagcagaaagtgaaattaaacaacctgccaaaagatccaaaatcattatgacatggtcacatttatgcatgtatgtaatttatgtgtgtgtgtatacatatatatttgtatatgttcatagaaatttaaaataatttcttttttttttttcttttggagatggggtcttgttatgttgcccaggctggtctcaaactcctgggctcaagcagtgctcccaccttggcctcacaaagtgctgggattacaggagtgagccactgcacctggcctaaacatttttttttttttcagatggggttttatgctgttacgcaggttggagtgcagtgctaccatttcagctcactgcaacctctgcctcccaggctcaagtgatcctgccacctcagcctcctgagtagctgggaccacaggcatgccccaccatatgtggctaattttttgtatttttggtagagacggtttcaccatgttgcctaggctggtcttgaacttctgagctcaggccatccgcccacctcagcctcccaaagtgctgggactacaggcgtgagccaccatgactggccctaaaataatttttaaatgaacacaaaaacaagcaaacaagcaaaatgtagataaagtggctgttgaagacaggccttggctgggttctggaatagccgagatgaggaaggctgcaccctcaaggacaccccacagagaacctctgactgctggtgacaggaggaatgcaacgacaacggagggtcccactcaccagcatccgtgccctgtgttgtcacagcagcccagttttcctttggggaaccacctcatctccccatcccttctctatcacctgcactgtgtatcatcttggtgggaccatcaagcaagacactgcccagtggccccgtgcggtgtggctcacgcctgtaatcccagcactttgggaggccaaggcgtgcagatcacttgaggtcaggagttcgtgaccagcctggccaacatggtgaaacgccgtgtctactaaaaatacaaaaattagccgggcatggtggtgggcacctgtaatgccagctgctcgagaggctgaggcaggagaatctcttgaacctgggaggcagaggttgcagtgagccgagatcacgccattgcactctagtctgggcaacaagagcaaaactctgtctcaaaaaaaaagaacactatgctcagccccagcagaggtggctgagtcttcagggcagccagccagatgctcctctggaaatgtgactcaggaatgaagggccaagcacagttgagcccaagctctcaacatgaaggcctcttggtcttgctccttaaaaccaggaggccgggcacagtggcccacgcctgtaatcccagcactttgggaagctgaggcaggtggatcacctgaggtcaggagttcgagaccagcctgactaacatggtgaaaccttgtttctactaaaaatacaaaaagttagccaggtgtggtggtgcacacctacaatcccagctactcgggaggctgaggcagaagaatcacttgaacccaggaggcggaggttgcagtgagctgagattgcaccagtgcagtccagcgtgggtgacagagtgagactccgtctcaaacaaacaaacaaacaaacaaaccacactaaataattatgagaatgcaaagtgaaagctggagcaagcagaattaaggctcaggaggagggtgggtctggatctgggaggatcacaaaagcaagccaactcccccaggcctaagggagaccagcttgcagttagacacaactgagggaaatgggctgacatttcctgtatcttccaggtgtaagccccagagaaagcaagtcactggatcaggaaccatggtctcctggatccaaatctaggcttttctcccagaaaggacatctgccagggatgcctggtccaggtggtggaggctgggtggctcaccgttctgtggtttccgtcttcgtggagagtttattccctcacgttgatgatgacggaagggcagggcttcttcaaggtggctgcttcactggtttgtgatccacccagtgtactcggagagcttctcgccacactttttctgtaatttgccagaaatagtaaatattttaggcttcatgggccgtctgttctctgccacggtgctagactttgttgtagtgacagcagccatactgtttacatattatctgtggcagcttttgacaccatatggagtagaaagcctacattttgctatctggttctttacagaagaagtttgccaaccctgtcatatagtatgaacatctttcttaccaccatcttttttttgagatgaagtcttgttatattgcccaggctggaaacaaactcctgggaccaagagatcctccccattcagcctcccaagtagctgggactaaaggcacatcaccaagccctgctgcttaccaccaattttttttttttttttttgagatggagtctctctctcgcccaggctggagtgcaatggtgcgatctcagctcactgcaacctctgccatccgagttgaagcaattctcctgcctcagcctcccgagtagctgggattacaggggtgcgccaccacgcccagctgatttttgtatttttagtagagacggggtttcaccatgttggccaggctgttaccaccatttttaatggctgcattttgtttcccttccaccaatgcttccaaagctgcttagtaatgacattcaaaacagaatctgccaagataagacaccttttgaatagcaataggaaaagtatctgcaaatcctgacttctcaaccagccctgccctagtgtctaagctccgacgggctgaaaaatgggcattttctaagtcatttctcctgatccaagatcttgaaactcttcaaacttataaattaggccacctgctgagcaatcctgtaggccctgtcctaagatgactcagggcagtctcttcttttccctgtaacctggtcctattcacgtgaagctatttttcagctatttgcaaaaagctccttaaaatctatttttccctttaattatagtttgcagctggtctttctgaaagcaaagaatttattgcttgccaagggccattaaagatcaagctgggttagggggtctccttgctgaatccagggaggagggttcaagacagaggctatttccgaaccagtttttctagttcccaggcactctccggattcttctctgggtttacttttcttaggtggaaaccctacctagatttgcaaatgacgtggagctctttgtcacccaagatcccttggggctcatgggtcagtcattgtttggaaagtgttgcctcttaggcttttctatttttataaaagagggattactgtctttgctccctgtaaccttggactactgccaagttttcttggtggcattttcacttgataaatatgagcctttctgctcctgacccagaagagtgcttctcctagcagtctcaggagtttcagacctagttatacccctgcatttatcgcctcagacatgtcaaatgcagatgtcacctcccaaccaacttttagacacattggtggagccagaaagatataaaagattatcattatgctaattttttaaatgtacagaactgccctttttaatctttaattttggagttttagccacaactcctttaaaataaaataatataataattttttttttttttttgagatggcgttcgctcttgttgcccaggctggagtgcaatggcgtgatctcagctcaccacaacctccgcctcccgggttcaagcgattctcctgcctcagcctccctagtagctgggattacaggcatgtgccaccacacccagctaattttgtatttttagtagaggcggggtttctccatgttggtcaggctggtctcaaactcccaacctcaggtgatccacccacctcggcctcccagtgttgggattacaggtgtgagccactgcgcccggcctataattttttattattaaatgatcattagagaataaataacactgtaggacaaattttccccttccatttttttttttttttttagatggagtcttgctctgtcacccaggctggagtgcagtggtatcacctcggctcactgcatcctctgcctcctgggttcaagcaattctcatgccttggcctcccagtaggtaggattacaggtgtgcaacaggcccagctaatttttataatttagtagaggcaggatatcactatgttggccagactggtcttgaactcctgacctcaagtgatcaacccgcctcagccttccaaagtgctaggattacaggcatgagccactgtgcccggcccccccgctttttttttttttttttttttttgagagtgtcttcttctgtcgcccaggctggagtgcattgttccatcatggctcactgcagcctcgacctccaggactcaagcaatcctcccaccgcagcctccccagtagctgggattacaggagtgcacaacccctcacccagctaatttttgtattttttgtagagacagggttttgccatgttgcccaggctggtcttgaactcctaggctcaggtgatccttctgcctgggcctcccaaagtgctgggattacaggcatgagccaccgcacctggctaaatccaaggatttttgtatccacgggtggatcctggaaccactgcgccagggataccgaggaatgattatacagaaaaaggaaattttctgtatacaaggagaacccagttggaaacacctcagcatttgccttatttgaacacagtttaaacatttggctgcctgcaactaactgaagctcagctagctattggttaaaagaatatactcctaatttagcctctcagttaatttatgtgttatgttaggttacagttcattacataaaggccaaagtatggaagcctcctcaggccaaatttagtttaatttaacaattcctcccttttggtcggtctcaattttgagagactgaccaaaaccttgacactactctctgtcaccatcatccgactaaatacggaacttacttagtctctgtatacaattcacaagtcacaacagttgaacaattctttatcttctggcagatctagttcaaatgagaccgttcaacatttgacgaatgattgtatacaaacatttaagatgtgagaggataggatacggtgcaccaggaggactattataatggctgtcaggagggttacaccaaaaagactgaagtgtactccttaacaaaagcttgtaggaactgaacccatccaaatcaaagttcaggcaatatagacagctcaataatatttggccatggtctgtattctggatttgatggcaattaaggactatagtttggtgtaaaatggcctgatttaaagaggtatctgtttttgttgttagcctgataatacaggctgtagcaatctagagacttaccaagagaacaagatgagaaaagcttggaaacaccaagctggccatccaccgctgaggaggcccgtggaccaactggtggctgctcccataaacacatcatctgttccttttccttgagaaattctcttttttattgttgttgttacattggcaattttttttttttttttttttttttttagctagagtctcgctctgtcacccaggctggagtgcagtgacgcgatcttggctcactgcaagctctgccttccgggttaaagtgattcccgtgcctcagctgcccaagcagctgggattacggatgcacaccaccatgcctggctagtttttgtatttttagtagagacaaggtttttgccacgttggccaggctggtctcgaactcctggtcttaagtgatcctcccaactcggcctcccaaagtgctgggattacaggcatgagtcactgcactcagccatgtcttgagaaattttcttagtgtatttggtagcagtgtctaaagaaacaacagtatcagccacctttttttttttttttttggaggggtggacagagtcttgctctgtcacccaggctggagtgtgcaatctcagctcactgcaacttctgcctctggggttcaagcaattatcctgcctcagcctcttgagtagctgggattacaggtgcacgccaccatgcccagataatttttgtatttttagtagagacggggtttcaccatgttggtcaggctggtctcgaactcctgacgtcatgatccgcccactcagcctcccaaagtgctgggatcacaggcgtgagccactgtgccctgccttcagccacctttttaattaagctttctgtagtaggaaaatcaaaagaaaaatagatacaatattccgttttcttaaaaaccatatacaaggctccgacttgagacagaaggagatctaaagcaggatgctctgctaggtgtttttgttgaacacatgtattatcacccactttttagaaagtggcttctacccctctgaacagcagggaggtctggctgactgcaaggtccaaggtgtttccccagtttacagatgagtgtcaaattctatactactagtgtcccacaactgccaagagtgagcctccagaaacctcactggaatctttcctcgatgaaactaacttgtcttcataaaccccataattgctcaggtttttgctaaagcataaaccttagctaaggccattcataaactatggttccatggattttcctggagagtaaaggaaaggattaagacagcaaaaaatgaagaaaagaaaaagaatgctgggtgtggtggctcacgcctgtaatcccagcactttgggaggccgaggtggatggatcacctgaggtcggggggagttcgagaccagcctgaccaacatggagaaaccccctgtctactaaaaaaattagctgagcatggtggtgcacgcctgtaattccagctacttgggaggctgaggcaggagaattgcttgaatccgggaggcggaggttgcagtgagctgagatcatgccattgcactccagcctgggcaaccaagattgaaactccgtcaaaaaaaaaaaaaaaagaaagagagagagagagagaaggagggagggagggagggagggagggaagtaaggaaggaaggatggaaggaagaaaggaaggaaggaagggaaggagggaaggaaggaaggaaggatggaaggaagaaaggaagggagggagggagggaaggaagggagggagagagggagggaaggaaggaagggagggagggagggaaggaagggagggagggagggagggagggaataaggctttcctgatggtagaggagccttgatcttggaaaagccgtccaggtctagaacaccatctgcttctggggagaaattttccccagctagctttacattaaagtctctaacggaggccaggagcagtggctcacacctgtaatcccagcactttgagaggccaagatgggtggataacttgagggtcaggtgtttgagaccagcctgaccaacatggtaaaaccccactcctggtatcaattttctgtgttagtttgttctcacactgctataaagaactacttgagactgggtaatttatgcagaaaattaatttaactaactcacagttctgcaaacttaatgggaagcatgactgtgaggccttgggacactgacaatcagcagaaggtgaaggggaagcaagcaccttcttcacaatggcggcaggagaaagatatagtgaagggggaactgccacacacttttatttacttttttttttaatttatttttttgagacggagtttcactcttcttgtccaggctagagtgcaatgacacaatctcggctcaccgcaacctccgcctccccggttcaagcgattctcctgtgtcagcctcccaagtagctggggttacaggcacatgccaccacacccagctaatttttgtatttttagtagagacggggtttcaccatgttggtcaggctggtctcgaactcctgacctcaacctcccaaagtgctgggattacaggcatgagccactgcactgggcctgaatttactttaatttaacagaatgcaattatgggcaatgagataaagaggaaaatgttctgacatttctagaaatttgctcacacctatatgaaatcttactttctttcattatctcacctgatactcataaaaactttgtgcaagggattttgaggagtactaatatttaggagagttgggcagatgaacaactaacaaaggtaaacaatcgaaagatccaagaaaccaagtgacgttattgtttcaaagaggcaccgctccacaatttcaaaggctgctgagaaattaagaataagaaggtgacctgtgtgtggctgatagatgaacaaaatggaagctattagtgagcttggtacctttcttgagccgtattgcttattcatatctcattccatttgtcttgatattctgcccagaagctgggaccatgctttgcacatggcaagtgcccattttatgtctgttagtagcagttttgctgagtgactgaaaccagagacttagcagagatgggtgtgctcagagttggcctccactctattcccattacaaagcaaaatacaatacaaagcaaaatacaaatacaataccaatacaaagcaaaattcccattacaaaaactcatcgccagacagttctacttacaggaatttgtcctaaagacagttcccccaaagcctgagatgctctacttacaaggatattaattgcaatgctatttgtaatagcaaaaggcgggaaaccacctaaattccaccaactagagattgtgcaataagctgcaaagcatccagtcagtggggcaataggatgcccctttaagaaagaacaaggctggccgggtgtggcggctcacacctgtaatcccagcactctgggaggctgaggcaggcagatcacctgaggttcaggggttcaagatcagctgggccaacatggtgaaaccccatctctaataaaaatacaaagattagcctgatgttgtgatgcgtgtctgtaatgccagctacttgggaggctgagacatgagaattacttgaacctgggaggtggagggtgcagtgagctgagatcataccactgcattccagcctgagggtgacacagtgagaatctgtcaaaaaaaaaaaaaaaggacggaaagaaagagcgaacgaggctgatgcctctgcactgagatggtctccacgatgtatttgaaaagtggagagaaaagagggcagaaccttacggagggaaaaaaagacaattaaaagaacagctgggccagatgcagtggctcatgcccataatctcagcactttgggaggccaaggcaggtagacatcttgagctcagaagttcaagaccagcctgggcaacatagtaagaccccctccccccaaccatctcaacaaaaaatacaaaaaatagccaagcatagtggcatgcctgtagtcccaactgcttggaaggctgagacaggaggattgcttgagcctgattgaggcttcagtgagccatgatcgcgccactgcactccagcctgggcaacagagcgagaccttgtttcaaaaaaaaaaaaaaaaaaaaaaaggaattatttcaatggatcttgcagtattgactggatagaaggctggaagccaataaagcaaagagaatacaaatagactgactgttctagaaattctatgggtaaaggaagaagggattaattagaaagcatacatttatttatgtatttatttattgagatggagtctcgctctgtcacccaggctggagggcagtggcgcaatctcggctcactgaaacttttgcctcctaagttcaagtgattctcctgccccagcctcctgagtagctggaattacaggcacccaccaccctgcctagctaatttttgtatttttagtagagatggggtttcaccatgttggccaggctggtctccggacctcaagtgatccgcctcccaaagtgctagaattacaggtatgagccaccgcgcccggccagaaagcatacattttttatttagattgtatgcttatctggcgtggcttgatacgggggtgctgatggggattgggaggtagagaaataccctcccaataataatagccaaacgcaacatagcacttgtgatattttctgtgaattttattagtatgaactcatttcaacctcctaacaaccctgtggggcaggtccttttcatacccccatttgtgaggacacagtggcctttctaatatcacacaccagcaagtgtcaaagcttcaaacccaggcagcctggtcacagagagtcacataactgctctgcaaacctgcctccctctgcttcagaggggctcagattcggggtttacctctcactagctgggcaagcttaggcactggccttctcagagccttggttttctcgccgcagaatgagggtaactgcagagttgttgagaagcatttgaagcacctgattcttggtgctcaatacagggaacgtgtgatagttactgccgacttagagcagagcttaggcaggcactgcaccaggatttgactattgatgcatctccaagctgagcctcggtaggcctgtggtcccatgctagagagcagctgccagtgcctccatctgctgcaaagcttggctgtgtgtggatgggtgggacaagtcactccagaagcttctccccttaagacatcctgacattaagggatcttcttcctttgctcctctttctgtcctccctgccccccttcctccctccctttcttccttaaatgcccaaagtcagttgataccttttcttaagtaactcaataagcaatacaggcagtttgctcatggttggcagtgggcaggattaagggaggattagggccctttgtcaatgtctcatctcctgtctgcagagacaagacctgaaggattgctaaagaatgcccttggtaacaactgtttctccaggaccttgtttggcttccccctggctgggtggaacccgctgtgtgcagccttcgcagggaggtgggccgaaggctgccaacgttggagcaggtgagctatggcatttgcattgggctgggtctccattcttgggccaaatcaactcacctcttgggcgagttgcttcagacttcagaaacaagccacatcatgccgagaggctttccccccagttccagggcccaagggtgcaggcacatagccagcccagccttctcttccctgtgtgttcccttctcccctgggtttctcctcccttgtgaagaaacagcacacctgcttttacacaaggccagtcctccacgggcgccctcatcccaccccttttgaccttctcaaggactacaagtctctaatgatcctctccctctcctgactcatccatctctccctctcccttgtgactcagcagtgtacagacctgcttctagattaaaacaaaaacagaaacccctccgaccaccccctccaccttttttcctgcttttcctcagagacaaacttctcagcaccccctgcctcctttcctcaattcccgtccattctccagcccacttccagctggctttggcacccactgtccctcctctcagattcactcttgtcaaggtcaccaggaatacccggtgcacagtacaacaggcacttccatgtcctcgcgggatgggtcttcccagctgcacttgacgcagctgacccagggtgctcccctgcttcccctcctggggcacgctcatggctttcccgcctcctccctctgaccctcctgcctcctccctctgatcctcctgcctccttcctcggacccagggcgctctcctccctcctctcctggaacacgctcatggctttcccacctcctccctggccatctcttctcagtcttcatttccaacttttcctctttctgttctctgaatgttggctttctgcatggctaagccctgggtccccctctagctagactctcatgggatggtctcatccatggccaaggtttttaacataatctagaagctgagactcccatattgcatctctggtcttgctgtcaactcacatgtccgtggcctgctggatacccctgttctgtctcttgggcattccacacttagtgtttcctaaatcagactgtccagggccttccacattggtttgctcccagtctcccttggagccggcactggtgccacccttccacctggtgcctggctgccaagcttgattccctcctcctcctccctaaaccctcccctcctcagacctcactttttccatcctcacattgccaccctaggccaggccaccatcagctcctgcctggacactgtgacagcctcctaagtgatcgacagcccccatttttcacgctgctgccattgagatctttctagaataaaaatcaaatcaagccagtcccttgcttaaaaccatttcacgctccctattgctcttcaggtgaagctaacctccttaacttggtttacacagcccttcccagccagcccctccctgcctctcccacctccagtgccacccccagacctcaagtgatccacccacctcagcctctcaaagtgctgggtggtggctcacacctggcgtcgtcctcttcctcccttcctcttcccctgccccttccccttgccctcctcctcctcctactcctccttcttcctcctccttcttctatgagtggtcagttattccaatgatagattacagaattggcttctgcctttcaaaaattaaatcataacccatctcctgaagtttgaacacagccttgcctaattttgtttcatttatgttattgttatcactacagttatttggggtggcctgaggacacggctggagctggagtgtggctgtgacctcctcttgacatctttctgcaccactattaatggtatcccaagtgctgggcacagaggaggagatagatcaatatttgatgaataaatggctgggcgtggtggctcacgcctgtaatcccagaactttgggaggcctaggcaggtgaatcacctgaggtcaggagttcaagaccagcctggccaacatagtgaaaccccatctctactaaaaatgcaaaaattaggccaggcggggtggctcacgcctgtaatcccaacactttaggaggctgaggtgggcagatcacctgaggtcaggagttcgagaccagcctgactaacatggagaaatcccatctccactaaaaatacaaaattagccaggcgtagtggcacatgcctgtagtcccagctactcaggaggctgaggcaggaaaatcgcttgaacctgggaggcggaggttgcagtaagccgagattgcgccattgcactccagcctgggcaacaagagcaaaactccgtctcaaaaaaaaaaaaaaaattagctgggcatggtggggcatgcctgtagtcccagctacttgggaggctgaggcaggagaattgcttggacccaggagacggaggttgcagtgagccaagatcacgccattgcactccagcctgggcgacaagagcaaaactcagtctcaaaaaaaaaaaaaaagactttgatgaataaatgaatgaacgaatgaaatcactctcaaaccagagcttcaagtttcatgttattggcctggagcggttaattttatcagcatacacaagactctcagtctccaaatcatggaactataggatggcaggatgggagaatccctggaccacccagggcccaacctccaaatttatcagttgagccagctgagccattgctcacccacagttgtcccggagcaggcaggctgcctgcaggatggaagaacgtggaggaggaagggtgtgcaggggccaggtcttacctggatttgttgattttattctcaatatgatgagaagtcccgagagactttaacataatccctgatcttattttattttattttattttattttaaagatcattgcaatccctgcaaaaccagattcaggactggagagagaaaataaggtatgggctggggagtcaacacacatttgtgcctctttgatggcaaggcctaggaacacatgcctggggtcagcttgccatcatgtggccaaacctaaggactgcacatctcccatcttgctttcccagggctccgtgtacttgtggagacaggatttggacccaggtctctcctcccaccaaagttcagggtctataggcctgagttcaagtcccggttcctgcactcccagccatatgaccaaagaggattcaggttctgtatccgactcatggggacagcaacacactcatctctcacagtgaagacccagtaagaaatggcagctgtcagccaggtgcagtggctcacgcctgtaatcccagcactttgggaggccgaggcaggcggatcacgaggtcaggagatcgagaccatcctggctaacacggtgaaaccccgtctctactaaaaatacaaaaaattagccaggcatggtggcgggcacctgtaatcctagctacttgggaggctgaggcaggaaaatggcatgaacccaggaggtggaggttgtagtgagctgagatcgcaccactgcactccagcctggcgacagagtgagactctgtctcaaaaaaataataaataaaaggccaggcgcagtggctcaagcctgtaattccagcattttgggaggccgaggcgggcaggttgcctgagctcaggagtttgagaccagcctgggcaatatggtgaaaccccatctctaaaaaaaaaaaaaaaaaaattagctgagtgtggcggcgtgtgcctgaagtcccagctactcaagaggctgaggcaggagaattgcttgaacccgggaggcagagattgcagtgagccgagatcgcaccactgcactccagcctgggtgacagagtgagactccgtttcaaacaaacaaacaaacaaaaaaaataggggctgggtacagtggctcacacttgtaatcccagcactttgggagaggattgcttgaggccaggagtttgagaccagtctgggcatcatggtgagacctccatttctattaaaaaaaaaaaattataataagtaaatgtctaaccaccttatcttagggaggaagaaactgaggctcagagaaaagcaggtagaaagcaagatttctcgggccaggcacagtggctcacacctgtaatcccagcactctgggaggccaaggcaggcggatcaccggtcgggagtttgagaccagcctgaccaacatggagaagccccgtgtctactaaaaacacaaaattagctgggcatagtggtgcatgcctgtagtcccagctacttgggaggctgtggcaggagaatcacttgaacccgggaggcggaggttgtggtgagctgagattgtgccattgtactccagcctgggcaacaacagcgaaaccccgtctcaaaaaaataataataataaaagaaagaaagcaagaattctcaaggctctgttcaaaatgcaggacttccactccccaggtcagcagtgagcccaaggctctagctccagcggaaggctggacagtgttagggccggaggtgccaggcaggcaccccagaatgagatgcagaaacggccagtgaggacagaagccatggtgctttggaagcccagctccttcttcctgctgatgaacaggcatccagagagcctgtgagcggggctgtgtgctccaggtcatgtcccaggtgtacagaatttcaggaatttagtggagctctcgcccagcaattttttgctttacaggagaggaagctgagatcctgaaagaggtggggcccggcccagggtcactcagcaattttcagtagctgctccctactggggaactgtgtgtctgaggtcgtggccatctgtccaaagagcttcttctgaccaaagtgctcattttcatagtgtgaccacagaggtatgtattttataaccttacctcatttcatcatcccagcagccttgcagggaggtttatttccattttgcaaatgaggactctgaggctcagggaggtgacgtgacatgcgcaaggctgggaggggtgggtgaggacttgccctgtctccactggcctccagaccctgcgctcacagctggtcccgtgtggcattacaagaacatttgagcttctcaggagggttaataaagggtgtaagaaaggacagatctttaggagggccgtcttcagagtttacttctctgtgttctagagagaaccaacgaccctcatgcattgctttttggcaagggaaatgaaggattcaggacagtgggcactgggcacccacagggtttattcaagcagccgaagctcctgcttcagaaccttggcacggttagggcccaaataagggtcttttccttctcactttgaacacagcctcgcctaattttgtttcatttatattattgttatcactgcagttatttggggtggccacccccatcccacagctgctcccacccttctctgctgtagaaatggaggagggaaggcccagtggctccagtgtgaggggaagagacctgactgcacctgggctgtgtcttctccgtccacagtacacccgtgggaagaggagtcggggcatcccttgctggaaataccccagccctgaaggttgctggcaaaaccaccatttaattcagaacaaaaagtctgctccaggagcccctgagagcgtcaaaaagaacaaggtgggtgggttggggggaaacatcactgagaggctacctaggcctggatccccggcagatgcaggtccacaacccgacgccgaccactggccggccctcccgagtgtctgactgcgggactacctggcatccactcgaagagaccagcctggggcatccctccctgcgccccaacccctgtggacactccctcgggagcatttctaactaggcctgggtatgtgaaaaaagaggaatcctttcgcagaaggcaggctggacctgggaaaacagttctccatggatggagaagtgaggggataaaggatgatgaacttagctgttttctttcctgtccacattgtttctaggttctttggaaccaggggtcatcttttatctcccacagtaactcatgtctgccttagacttatttccaacccctcaagatcagttgaagatctttgtaggatctacacattcatactttacttactgacaccccacaacctgtaaaccataacaaaatgcacctgctgcacacatctgaaaggttttctttttttttgttttgttttgtttgagacagaatcttgctctattgcccaggctggagtgcaatggcgtgatctcagctcactgcaacctctgcctcccgggttcaagtgattttcccccctcagcctcccaagtagctaggattacaggcatgcaccaccatgcccagctaatttttgtatttttagtagagacagggtttcaccatgttggccgggctggtgtcgaactcctgacctcaggtgatctgcccgccttggcctcccaaagtgcttggattacaagcgtgagtaccatgcccagccaacattttctttgctataaaatgttttaaaatgtataactgagttttgccagctgaatatagttcaatttgttcttgtgattcaaactttattatgtttttatataaagctatatcaagaatccaaaaacattctatacatttggaagtttaaagacaagcctctaaataggtcacaatcaaagaggaaatcacaatgtaaatgggaaaatacctagaactgaaggacaatgaaaaccctacctagttaaatgcgtgggaggcaggtaaggttgtacctaagagaaaatatatggccttaaataaatgcacatatataatcaggaagaaagaccaaaaaataatgagttaaagtttcaactcaacaaattagaaaaggacaccagagtaaatccaaagaaaatgaaagagaatgataaaaataatagtagaaattaattagaatgcactcagagtatcaacaaaaccagaagttggctctttgaaaatgaagacaaataactaagactaataactaagacaaataactaagatattatttatgaaaaaaaagaaaattatacattttatgaatggaaacagaggcactacagacatggtagagattaaaaaataaaaggacaagccaagcacactggcatgtgcctctaatcccagctacttgggagactgagacaggaggatcacttgagactaggagtttgaggctgcagtgagctgtgatcatgtcactgcactccagtgtgggtgacagagggcgaccctgtctctgaaaagtaaatacacagagataagagaacactttgaagcagctatataccaatgaatttgaaaatttagaagaaaacgacaatttcctgggaaaacacaacctaccaaaatcacttttgaggactgcagtacacctacattcattatattgaatcagtagttttacatgcagccaagagactctacaaaacctctgtgattttgcaagaaagtcctaacaaataaaaaacagataatccttgtattgttccagagaataaaaaatgagagaaaactccctgtgctagtctgttttcacactgctataaacaacctctctggccgggcgcggtggctcacgcctgtaatcctagcactttgggaggctgaggcaagcggatcacctgaggtcgggagtttgagaccagcctgaccaacatggagaaaccctgtctgtactaaaaatacaaaattagccagacatggtggtccatgcctgtaatcccagctactcgggaggctgaggcaggagaatcacttgaacccaggaggcggagattgcagtgagccaagatcacgccattgcactccagcctgggcaacagagcaaaattccgtctcaataaaaaaaaaaaagaacttccctgagactggataatttataaaggaaagagatttaactgactcacagttccacatggcttgggatgcctcaggaaacttacaaacatggcagaaggggaagcagacacatcctacatggcagaaggcgagagagagcgtgtgtgaaggaggaactgtcaaacacttagaaaaccatcagatctcctgagaacagcatgggggaagccacagccatgatccaatttcctcctcccctgacacgtggggattacaagtttctcccttcccatgtggggattacaatttgagatgagatttggatggggacacaaagtcaaaccatttcactccccatctcatttgtttttcttttgagactgagtgtcactctgtcacccaggctggagtgcagtggcgtgatcttggctcactgcaacctctgccttctggtgtcaagcaattctcctgctttagtctcccaagtagctgggattacaggcatatgccaccacatctggctaatttttgtatttttagtagagatggggcttcaccatgttggtcaggctggtctccaacttctgggctcatgtaacccacccaccttagcctcccaaagtgctgggattacaggtgtgagccacctcacccagcacccatctcatttagtgaggctagattcatcttagtacaataccagagaggagagaaacaaacaccatggccagtattgcttaggaacacagttcaaaaatactacgtaaagtatcattaagccaaatggaactaaatatggagaacatatattttgtgtgccctctgtggaagtccctgggacagggtggggcagcaacctggcagggagctggtgctcatattgtcagggtgcctgggagatccaatggcccagtagttgaggagatttgctgcacacagggtgacggagaaaatgagtcaatatatggaggatttcagggatccaagtttcttactttcttttttttttttaagagacagagtctcactctgttgcccaggctagagtgtagtggcgcgatctcagctcactgcaagctctgtctcctgagttcacgccattctcctgcctcagcctcctgagttgctgggactacaggtgcccaccaccacgcctggctaatttttttttttttttgtatttttagtaaagacggggtttcaccgtgttagccaggatggtctcgatctcctgacctcgtgatctgcccgccttggcctcccaaagtgctgggattacaggcataagccaccacatccggctcaagtttcttattttcagagaaaaaaaaagtccaattatggaaggaggaaatgctagaatgaatcctggggagctttttggaatgggaagaattaatatgaatgtgtttttccatataaatatataaaacaatcaatgtaaatgtgtacacacacacacccataccccagtagtaatgagcacacttagtagtcagatctttgtttctaaacaccaccttccactaaaagaaaccagacctttgagaggtcaaggcgggataatcccttgaagctagaaatttgagaccagcctgaccaacatggtgaaaccccgtctctaccaaaaatacaaaaaaattagctgggcaaggtggcgggcgcctgtaatctcagctactcaggaggctgaggcaggagaattgcttgaacccgggaggtggaggttgcagtgagccgagatcgcaccactgcactccagcctgggcaacagaacaagactctgtctcaaaaaaaaaaaaaagaaaaaagccactaggttttgggtaatttgtttacacaatagataactaatgtgcgtggaaatacaagtgaccaaggaattgcttattgctttttgtatgatcttcatctctcccactgctcattccgcatcatcccccgactttggccatctgcaccccagttgccctcaaccaaagtcaagctccactctctaagctgggcttgtactgtcggggttcccttgctgacggctctcctcatgagactctgattttccccaagacagaccttccccctccttttcctttatatgttgagcagcagggtccctagtgttgggcaaagaccctggcagacggtgggcggttaggaattgtcagtgggaggagttatacccagtcataattgaggacccagtgatggttggatttatgatgactgccaggcaccgtgctgagttctgcaaaccctaaattctagaccaggggttctcaaagtgcactccccacccgagcagcatcagtatcccaaaattcctgggcctcaccccagacccactgaatcagaaactctaagggttgatcctagcaatccatggcttaacaatttctctgggtggttctggtccacatttacatttgagagccaccgttttggagtttgagaagacaatgaattagggcaaatgggtcaattcccagcagagagaagcaagaatcttttctgaggcccacactgaattccagctctttcctgggctgatgttaccattgtccttcatggggtgggtccacatttccagtcgcccacctggggagctggtgcagcagagaatgtgcttaaggctcaaatcccagcttttttcctgttttaaatctcggctttatttacttttatttctccaagtgggacttcatgtgacttatgggggagctattttgtttgtttgtttgtttgtttgttttttgagacggagtctcgctctgtcgcccaggctggagtgcagtggtgcaatctcggttcactgcaagctccgcctcctgggttcatgccattctcctgcctcagcctcccgagtagctgggactacaggcgcctgcaccacacctggctaatttttttgtatttttagtagagacagggtttcaccgtgttagccaggatggtctcgatctcctgacctggtgatccgcctgcgttggcctcccaaagtgctgggattacaggcgtgagccacggcgcccggcctgaataagtaaatttaaaaaaaaagaaaaaaaaaagaggccgggcgcggcggctcacgcctgtaatcccagcactttgggaggcgtaggcaagtggatcacgaggtcaggaattcaagatccgcctggccaagatggtgaaaccccgtctctactaaaaatacaaaaaattagccaggcgtcgtcatgggctcctgtaatcccagctactagggaggctcaggcagagaactgcttgaacccgggagctggaggttgcagtcagccgagatcgcgccactgcactccagcctggcgacagagggagagactctgtctcaaaaaaaaaaaaaaaaaaagagccaggtgttggtggctcaggcctgtaatcccagcacttgggaggccgaggtgggtggatcacctgatgtcagaagttcaagaccaacctggtcaacatggtaaaactctgtctctactaataatacaaaaattagctgggcatagtagtgaacacctgtaatcccagttacttgggaggctgaggcaggagaatcacttggacccaggaggtggaggtcacaatgagccgagatcactccattgcactccagcctgggtgacagagagagactctgcctcaaaaaattaaataaataaataaatatcttatctagaggcagggctctgtgtgtgtgtgtgtgtgtgtgtgtgtgtgtgtgtgagaaggaggaagggacataggccaggcacgatggcttacgcctgtaatcccagcactttgggagtccaaggcagacggatcacctgaggtcaggagttcaagatcagcctggccaacatggtgaaaccctgtctccactaaaaaattagctgagtgtggtagcatgtgcctgtaatcgcagctactcgggaggctgggcaggagaatcacttgaacctgggaagcagaggttgcagtgtgtgagatggggccattgcactccagcctgggcgacagagcaaggctctgtctgaaaaaaaaaaaaaaaaaaaaaaaaaaaaaaggagtggggggcgggggacagagagaggcaggctactttatagaattccctttctctgtcaggtgtttggagctcatttttcattttattttatttacttatttatttatttttgagatggagtcttgctcttgttgctcaggctggagtacaatgatgcgatctcagctcactggaacttccacctcctgggttcaagtgattctcctgctccagcctctggagtggctgggattacagacgtgcgccgccacccccggctaattgttttgtatttttggtagagatggggtttcaccatgttggccaggctggtctcaaactcctgacatcaggtgattcacccacctcagcctcccaaagtgctgggattacaggtgtgagccactgtgcccaggctgttttttattttattttattattattgtttttttgagaaggagttttgttcctgtggcatgatctcagctcactgcaatctccgcctcccgggttcaagtgattctcttgcctcagcctactgagtaactgggattacaggcatgtgccaccacgcctagctaattgtttgtatttttagtagagatggggtttcatcttgttggccaggctggccttgaactcctcacctcaggtgatccgcctcggcctcccaaagtgcagggattacaggtgtgagccactgcgcccggctggtctttagagcttattttcaagcccatcacaaagtccactcctcctcaccaccccatgaactttctcgttgttcttgctgctatctagagtgccattcctgtctttctccttctcctagaagttttatgcaatccatagaacaatgcagaagtgacggggggttgggggaggattaggaggaggaggaggaggaggaggaagggagaatgaactgctcccagttctctggcatgtatcctgccccttgcttcatgctcatgaaaaacattttatagcatatttacagctgcttagatgtaggtgcaatgtatccatggaaataatccttgcaggatatacaatttattgtgtaagttaaggaataaaatgtcagaaggatgaattatgtgcccagtgacatatagcaacggcatggctgagattagcctggttatcccaatcactcctgctctttcccaaaaaaatgagtgaggaatgtgccccagctcctccatgtctaacctccgtgctgagatgtgctgagcacctactatgtgccaggcaccgcactgagctctttatacaattagatctcattgtttcaccaccacattgcaaggcagttactgtatcatcctgattctataaatggaaacagtaaagctcagagagatactttaataactcaaccattgttacccagcctgggtgtggcagggaagcgatctgaacccaggtaacctagcttcgagactgtgggcttcaccactgctttctattggcaaccttcagatagtttctttctcttgaatatttagtatattcgtttctattgctgcttcaacaaataagcacaaacaacacagatttattctcttacatttctagaaggcagaggtttaaaatggattggtgggaccgggcgcctgtaatcccagcactttgggaggctgaggcgggcggatcacgaggtcaggagatggagaccatcctggccaacatggtgaaacccagtctctactaaaataaaaaacttagctgggcatgatggcacgcgcctgtagtcccagctacttgggaggctgaggcaggggaattgcttgaacctgggaggcggaggttacagtgagctgagatcatgccactgcactccagcctagcaacagagcaagactccatctcaaaagaaaaaaaaaaaggattggtgggactatattccttctggggtgttagagcaggatccatttccttgccatttccagcttttttttttgtatttttagtagagacggggttttaccttgttagccaggatggtctggatctcctgacctcgtgatccgcccgcctcagcctcccaaagtgctgggattacaggcgtgagccaccatgcccggccccatttccagcttttaaaagccgcctgcattccttggctcctggtggtcacctccatctttccagacatcactccagcctctgcttccatcttcagctctcctcctctgactcagatcctcctgcctctcccttctggaaggcgccctgtgattaccttgggcctgcccagataatctgggataatctttctatctcaagatccttaatttactcctatctgtaagatcccttcgccatgttaggtaatatatccataggttgcagggatttggatgtggacagcttttgggggctattattggttctaccacatttggctgtttctattttgtagactaataacaaaaaacatttttgaatgccttcatagactttaattccattagcttaattccacctgaaaaacctgttgatcgagcaaaactaggttatttggacttcctgcagtaaaggagaacaccgtcaacagattcaaattagggaaattagggaatggtatttatgggtttttagggccctggctgggtgatgttaaagcaagtcttgcaaggcaggaaactggttgcgattggggagtttctgacataagagctttggaatggtgggcccaggaagacagggttttgaactcacatctgatgcataatcttatcttccagagcaggtatttttttggagcaagaagtgaagtgacttttgcctgtcttgatattgcttaacccaaggattatgttggttttagcccttgctaattacaataatagtatttttttgagactgagtctcactctgtcaccacgctggagtgcagtggtgcgatctcggctcactgtaacctccgactccctggttccagtgattctcctgcctcagcctcccaagtagctaggattacaggcacatgccaccatgcccagctaattttttgtatttttagtagagatggggtttcaccatgttggacaggatggtctcgatctcctgaccttgtgatgcacctgctttggcctaccaaaatgctgggattacaagcgtgagccaccatgccaggccataatttccattttttagagcacctcctacaggccaggcaattttgaatacattttgacaattacaacaaccctacaaggcaggtatttcaacttaatctcagtatggcgcaataactcccctcttggattttggagtcaaaaagtcttggataaaaatccgggctcctccacctacctgccaggtgaataggcaggtaagttctctgggtgagtctccatgtcttcatctgtaaaatcaggataatgcttcccacttcgagtgtgtaggagtgtgcacactgtgtgcccacatgagtaaggggaccatgcttccctgtcattgtttttgttttgttttgctttaagacagagtcttgctctatcgccagactggagtgcagtggcgcaatctcagctcactgcaacctctgcctctcaggttcaagcgattctcctgccttagcctgtctagtggctgggattacaggtgcatgccaccaggcccagttaattttttatttttattttttttgagacagagtttcgcgctgttgccaggttggagtgcagtggtgcgaacttggctcactgcaacctcggcctcccgagttcaagtgattctcctgcctcagcctcccgagtagttgggactacaggcacacgccatcacgcccagctaatttttgtatttttagtagagatggggtttcaccatgttggccaggatggtctcgagctcttgacctcatgatctgcctgcctcagcctcctaaagtgctgagattacaggcatgagcgactgcacgaggccatttttttttttttttgtatctttactagagacggggtttcaccatgttggccaggctggtcttgaactcctgggctcaagtgatccacctgcctcagcctcccaaattgctgggattacaggtgtgaaccagtgcacctggccccctgtcattgttatcattgttagtagtgtccttttttattttttatttttttgaggcagaatcttgctctgttgcttaggctggagtacagtggtgcaatctcggtttactgcaaactccgccgcccagggttcaagcgattctcccgcctcagcctcccgagtagctaggataacagacgcatgccaccacacccggctaatttttgtatttttagtagagacagggtttcagcatcttggccaggctggtcttgaactcttgacctcgtgatccaacccccttggcctcccaaagtgctgggattacaggcgggaaccaccacgtccgaccatgtccttttattattccccaaagagtccttccttagatgatgaattatatgggcacagttccaatatggtgacactatgcttattacttttactcagtaggtgaaaggggatggatcagtgagcttaggtgacatgcttagggctgcacggctaattgggaagaattctccaagctaaagctgcatagcagaccaggtgctatccttctgcctggaacaactcaacacaatgccagactttgtaactatgtatttgtgtgatttgtttcgattttgatgtttttaattgagacagaatcttgctctgttgcccaggctggagtgcagtgattggttcactgcagcctcaacttcctaggctcaagcaatcctactcctcaagcctcccaagtaattggaactacaggcatgcatcaccatgcccagctaatgtttgtattttttgtagagacagggttttaccatgttgcttaggctggtctcaactcctggcctcaagcaatccacccacctcagcgtcccaaagtgctgtgatcacagggcaaagccactgtgcccggcccatttatgttatttttaaatgaaacctgtcttccaccaggctcagtggctcacgcctgcaatctcagcactttgggaggctgaggtggtcaggagttcaagaccagcttggccaacatgttgaaaccccatctctactaaaaatacaaaaattagctgggcgtggtggcgtgcacctgtagtcccagctactcaggaggttgaggcaggagaattgcttgaacccgggaggcagaagttgcagtgagccatcacgccactgcactccagcctggtgacagagctagactctgtctcaaaaaaaaaaaaaaaaaaattggtgaggaagagatcattcatcattgtcactgtatttgataaacatccatctcccacagctgggcagacataagagcggggagaaattctggccatgcactgggcgctctcaggtatggtttatatgcctggctagggcctggctccaaatgtcccccagcaaacaggtttgttttttttttttgtaattaccatactttgggcttggccctcacaagattatctcccttgaattagataggatttttttggacacgatgaaaaaccgtgcctcctcttaacagttactatattataatgctatgccttggtctttactgcgggggtctcctagttccaggaggatattaacccacacatatttgtgtatttagatgaaggtaatatatggtcctggtattaaaacttcaatcactatagaagagtttttaacaagatttaaaatatgtgcagaccccatgactcagcagtttgaactccaggaacctcatctttaaaaacatgcaaccagcaggtgtgcagaggatacttcttttatctctctttgtaaaagcaggaaaaactggaataacctaagggtctattgaggagagaggggttgctgacttacacatcagggtctatccatacaatggaatgcctctcaggtgtcaaaaataaggaggctgagctgaagatggtatcaaggatttggcattagagaacaaagcaaacattaacattatgtatgcttgcacagagatagatactcatataactgcctagacaagggcctaaaaatgcaaagtacttaaatctgttacctctttggcattttaaaaagattgtatttagataatattgaggtcattttagaagacacacacttactgcattaaaacaagcaaaagttgaacaaaaaggtaataacgttaagcaggttacaattccattgtaagtaaatggtggtgttaatagttcaagtgcttccttggtcactttaagattgtttttccagagctgggcagcaggagaaataagttaaaatttcattccgacatccccctgccaaaaaatagcctgaaaattcagcctcagctctggtctgaatccggtgacaggactgactaccaggagatctctcagcctctgcgctgctgactttggggtctgagtcattcttggttctgggaggctgccctgtgcattgcacggtatacagaagcttccttggcctctacccattcgatacctgtatcaccccctcccagttctgacgaccaaaaatgtcttcagacccagatatcccctgaagtgcaaattgcccatcccatccccacctgtggttgagaatcactggagtaggatgatggacgtcagggtttcctgggatccacctggttggtgtctcatgaactgaggaaattactaactgcgccccctttccttctgtaataaaccacatggtcactctggctccggccctttttccctagaaaaatgtacccatgcttgtggcatcataatccccatgtctgtcattctcgtcaacacttctcatggtttttgtcacgcgcgtccgtgtgaagagaccaccaaacacgctttgtgtgagcaataaaactttttaatcacctgggtgcaggcgggctgagtcttgtatatgtgcaggtcacacaggggataagatgacttagcttgggctcagaggcctgacagttttggtcgtagccatcttcgtggatgcatgatatacccttttgaaacttcttccagaactttttttctttttcttttttttttggagacggactcttgctcggtcaaccaggctagagtgcagtggcatagtcttggctcactgcaacctccgcctcctgcgttcaaacgattctcctgcctcagcctcccgagtagctgggacggctgacacacaccaccacgcccagctaattttcgtagattttgtagagacagggtttcaccatgttgcccaggcttgtctggaacttctgggatcaagcaatcctcccaccttggcctcccgaagtgctgggattacaggtgagagcaactgcgcccggccttcttgtcttagatttgttttactcaaagccctgtggcttacctttatatgaagttccaaagaaggacattttaacactcctgtacttaaatcactacagaagcatgtttgggtgaggaaactctatgaacttggtttctaaagaaggccttccagccacgggcacgctacacaatgtggggccatttattttgcaaatcagtaagacttcaaaatttaaaaaataatagtataaaaatgaggatggaccgggcgtgatggctcatgcctgtaatcccagtactttgggaggctgaggtgggtggatcacccgaggtcaggacttcgagaccagcctggccatcatggtgaaaccctgtttctattaaaaatacaaaaagagcttgaacctgggaggcagaggttgcagtgagtggagatcgtgccactgcactccaacctgggcgacagagtgagtctccgtctcaaaaaaataaaaaataaaagaaaatttaaaaataaaaaataagttaaaatttggatgaattgctgggggaatggagaaatcaatttctatttttggtccttctgccctgtttttgtttgtcttctgggccatgcagatgtcttgtttttataattaaaaaactaggcggggtgcagtggctcacatctggaatcccagcacttagggaggctgaggcaggaggattccttgagcacaggaattcaagaccagcctgggcaacatagccagatcccatctctacaaaaaattttaaaagttagccaggtatggtaatgcacacctatggtcccagctactggggaggctgaggcaggaggattgcttgagtctgggagatcgaggctgcagtgagctacgataccagcatggccctttagcctgggtgacaaagagagaccctgtctcaaaacaaaaacaaaacaaagtattttattatacgtaagtccaaacacattagcacaggccctgaagaacagcagaaattgcacctaaatctccttctccccatgtacatatccaaccccaccccttgttcccatttgtgctcagctggggtcaaggtctcaccatcagagctggcttccgaaagggctcctttccctacaggtttcccccactggactttacctccagatgcccaggacatgggacatcatgcaaagacctagcacgtggtgagcatttagaaaatatttacagaattattcacagtatttgttgagcacctactgcttattcatatcagttatgatctgctgtgcactgctgagcactggcagaaagagaagaccctgagcatcttaaattcacggcagttgccagctggagttcccatctgaatttcctggaggaaggcagaccccatcgcgactttctttctttcttttttttttctccttgaggctgagtctcgctctgtcgcccaggctggagtgcagtggtgctatctcagctcactgcaactgccacctcccaggttcaagcaattctcctgcctcagcctccagagtagctgggactacaggcgtgtgccaccacgcctggctaatttttgtatttttagtagagacggggtttcgctatgttggccaggctggtctcgaactcctgacctcaggtgattcaccagccccagcctcccaaagtggtgggattacagccataagccactgcgcctggcctcttcatttttttgagaccaagtctttctgttgcccaggctggagtgcagtggcacgatcttggctcactgcagcctccaccttctgagttcaagcgattctcctgcattggcctcctgagtagctgggactacagatgcctgtcaccacgcccagctaatttttgtatttttagtagaaacgaggtttcgccatgttggccaggctggtcttaaactcctgacctcaagtgatccaccggcctcggcctcctaaagtgctgagattacaggcatgagccactgtgcccatcccccaccgggactttctaattcaggaattctagagtgggaccctgtaatttgcatttctttttaaaattattttttgttcttttcttccccgcccaccccaccccgcgccccccacccacccagcttttcctgactggagaagaacggggacagaaggcctgatttgcatttctactatttcccaggagatgttgacgttgcaacaaagagaaccactcaaagagaatagctctgtgagaaccaatgttctagagtttaggaagaccatcaattggggtaaatgagccaattcccaggagaaaaggggaaggaccttttctgaggcatgatctgaatttccagggctgatgttgccctttgttatttccacaggggatctgcgttttcaatcgctcacctgcagagccgccagattctggccaatctcggcttttttccctctcactgtgggttcttcagagccccatggtttagacacaacggtggattctcttgtgccccaattaccacatgcgtcatggggagaagagcttgaaccccccagagggtcaggtccaggtgagaattgagggtgacactgagagaatttagctaggtgggcgctgtgtaccgcatcattgcctgctcctttcgcagttttgcatttgtgtgttgtacagctacgtgtctcaacctagaaggatctccaggatgtatccttgggtggaaaaatttaggtactagaatctaggccgggcgcggtagctcacgcctgtaatcccagcactttgagaggctgaggtgagtggatcatgaggtcaggagatcgagaccatcctggctaacacggtgaaaccccatctgtactaaaaatacgaaaattagctgggcacagtggcatgcactcgtagtcctagctactcgggaggctgagccaggagaatcgcttgtacccgggaggcggaggttgcagtgagccgagattgcgccattgcactccagcctgggcgacagagactcctccatctcaaaaaaaaaaaaaaaaaattagccgggtgtggtggtgggcgcctgtaatcccagctgctactcgggaggctgaggcaggagaatcgcttgaacccaggaggtggaggttgcagtaagccaggattgcaccactgctctccagcctggatgacagagcaagactgtctcaaaaaaataaataaataaataaataaataaatataaaaattaaaaaaattttaaaaaagaaatctatattgagttttgtacctacctatgattcatggatacctaccagggaaaaagcagaataaaaacatgcacagaaggaaatattccaaattgtgcttgcctgggtggtaacttgctataatgttttacttctgtaatgggagggagtacacacgtggctattctattattcctcccatgttttcctatctgaaatatttcatattttaaatgtttatgtaataaattttgtcaacctctttcttcaagtcttggtgttaaaatcatgtgtattactaaatcttttttttttttttaaatttaagaggcaggatctcaccctgtcacccaggctagagtacagtggtgtgatcatagctcagtgcagcttcaaccttttggactcaaataattctcccacctctgccttcccagtagctgggagtacacgtgtgagccatcatggctggctaattatttttatttcttgtagagataggatctcaccacgttgcccaggctgctctcaaactcctgagctcaagcaatcctcctgccttggccacccaaagcgctgcgattacaggcatgagccactgcacctggccttaaacactttttcttcctaatatatttttacaccttcagctgtttgctatatctaacggccagccctccatatccatggggtcctcattcatggattcaagcaactgcaggtggaaattattagaaataaaaaaggatggttgtgtttgtactgaacatggacagtttttgttattattctctaaacaatacagtataacaactatttacatagcatttacattgtattaggtattaaagctaaagactgcacagcaggtcctcaaataactttttttttttttgatggagtctttttttttgatggagtcttgctctgtcacccaagctggagtgcagtggtgtgatcttggctcactgcaacctccgcctgctgggttcaagcgattctcctgcctcagcctcccaagtagttgggattacaggtgtccaccatcatgcccagctaattattgtatttttattagtgacgggatttcaccatgttggccaggctggtctggaactcctgacctcaggtgatccgcccgcctcagcctcttaaagtgctgggattgcaggcatgagccactgtgcctggccaacattctttcatttaacattgtttcattatatcattgatgagaaaacaaattggttttgtttatacatcctttccctttaagtcaaagtttctaagaatcttaactgtatacagaaggatgtatggttggttacatgcaaattctccatcattttatgcaagggacttgagcatccatggattttggtgcctgaggagagtcctggaaccaatcccccatggatactgagggacaactgtaatcttttttggaataaggaattaaaaatttccccaaaatgcttctccttaatgtcatttattgaataacttgttatttctccactgatgggaaataataccttttaccatttaccaaacccccatatatatgtggatggaattctaaacaccttattctattttattaagttttctgattaccctataccagtaccagatcacttaattaaaattggtattattatcaagaggacacgtgcttctggtaaatgatgttgagacaacacctagagagtttaatttcccacctctcctaaccgcacttcccagagacaaagctctgggttagggttcgcagcaggattaaggagcaagagcccagctggggtgctggggagcatgcagggccttaggaccagcgaagggaggttgcaattatttccccagggttctgggtggtccctgttcattagctagaaatgatgcacctttggggctagcaatgcgctgtggttgttagtactttattgatgaaaaaaatgaggtcatgagtggctgtctaatccaaaatcatactgctagggagtaggtgaaattcctcaagttaaagttgcatagcaagacacatgctgtttcttttatttggaatatcttccctcctccatcactctttcacatgttgtagcacatatatgtgtatatatatggtgtgtgtatatatatagtataaatatatgtatttattttatatattatatatacacatatattatatatatgtatgtgtatatatataatatatatcacatatattttatatatatgtatgtgtgtatatatatatgtatgtgatatatatatatatatgtatgtgatatatatatatatatgtatgtgatatatatatatatgtttgagtcagggtctcactttgtcacctaggctggagtgcagtggcacaatcacggctcactgcagcctcaacctcctgggctcaagtgatcctccccactcagccttctgagtagccacgactaaggcatgcaataccacatagatatttgattgctgtgtccccagtagaccagaaactccaaagtgttgggcactaggtctattttgttcactgctctatgcgcagtgcctgtaattgtgagagtgtatggtaggtgctcaatggatgtttgtggatttacaggaaaacccttatcctggtgcctaggaaagggttaagacatactaataatttcgggcctagtggctcatgcctgtaatcccagcactttgggaggctgaggtgggtggatcacctgagatcaggagtttgagaccagcctggccaacatggcaaaaccccgtctctactaaaaatacaaaaagtagctgggcgtggtggtgggtgcctgtaatcctagctactcaggaggctgaggcaggagaattgcatgaacctgggaggcggaggttgcagtgagccgagattgcgccattgcactccagcctgggtgacaagagtgaagctcagtttcaaaaggggggaaaaaaaaaaaggctgggtgcagtggctcacgcctgtaatctcagcactttgggaggccgaggcaggcggatcacctgaggtcaggagtttgagaccagcctggccaacatggtaaaaccccaactctactaaaaatacaaaaattacccgggcatggtggcacgcacctataatcccagctactccagctgaggcaggagaattgcttgaacctgggaggtggaggttgcagtgagccgagattgcaccattgcactccagcccgggcgacagagcaagactccatctcaaaaaaaaagaaaaagaaaaaaagaaaaaaagacatgcgaataattatgtgccagagggcttttgatcacagacaggctcagtctccaaatgtctagtacagaatcctctaaagatgttcgcaagtccagcgacatggtgtgcattccagtaacagaaaagcctctgcttccatcaattatctgtgtaggtgctgtgaccccgtgcctgagtaacccagagtctgtgagtaacagagcagtcctcattttggttgcttttatttaaacattggtaccaagccacctttcaataagttagacccggccagtgtggtggttcatgcctgtaatcccagaattttgggaggctgaggcgggcagatcatgaggtcaggagctcaagaccaacctggccaatatggtgaaactccatctttactaaaaatacaaaaaaattagccgagcatgagggcacgcgcctgtagtcccagctactcgggaggctgaggcaggagaatcacttgaacccgggaggcggaggttgcagtgagcgagattgtgccactgcgctccagcctgggtgacaggaggctccgtgtctaaagataaaaataaaaataaaaatgtaaataagctagacccaggaagcagaaatcatgcccatgccctgggttgtcttggttatggtttatgtgccagtgcttttgttacctgtctcctggatgggctattcaggcttacaagactttcccttaatcaccacacctggggagtgggggtgtctcatagatttgctgccacctgataaaatgaaaattctaaattctcctggaatattttcttgtttactagaataacatatcctacaaatcttggtctcctaccacaggagaaaattattgtttttatgtatcaactaacttacattccttaaggtggacttttccccagatgttaaaaaatgcatgctgggcgtggtggctcaagcctgtaattccagatacttgggggactgaggtgggaggatcttttgagcctagtagttggaggctgcagtgaactatgatggtgccactgtactccagcctgggaaacagagcaagaccttttctgtatttacaaaaaaaagagaaaagaccgggcatggtggcttatgcctgaaatcccagcactttgggaggctgaggtgggaggatagcttgagcccaggagttcaagactggcctgggcaacatagagagaccccgactctgcaaaatataaaaattagggccccaatgtctacgcacaccggaagacagaggtcctctttccttgcctaatgcagccatggctcgtggtcccaagaagcatctgaagcaggtagcagctccaaagcattggatgctgaataaattgactggtgtgtttgctcctcatccatccaccagtccccacaatttgagagagtgtctccccctcatcattttcctaaggaacagacttaagtatgtcctcactggaaatgaagtaaagaagatttgcatgcagcggttcattaagatcaatggcaaggtccgtactgatataacctactctgctggattcatggatgtcaacagcattgacaagtcgggagagaatttccgtctgatctatgacaccaagggtcgctttgctgtacatcgtattacacctgaggaggccaagtacaagtttgtgcaaactgagaaaaatctttgtgggcacaaaaggaatccttcaaatatatatatatgtgtgtgtgtgtgtatatatgtatatatatttatatatatgtgtgtatacatatgcatatatatttatgtgtgtatatatgtatatatatttatatatatgtatgtgtgtatatatatttttttcccaaaggaaaaagaagacgtgagccaccgtgcccagcctccacaattgtattatacatatatcaaaacatgttgtacactgtaaatatacataacttttatttgtcagtttcagcttaacaaaactagaggaaaaggctagtagagaacaaaacgagatacgggcatagataataatgcagaagaatggacaagtatattgccaggtggtagatttatataaaattgcaaagaataagatcctcgttataaaagctgtatgtgaggccaggcgtggtggctcacgcctgtaatcccagcactttgggaggccgaggtgggtggatcacctgaggtcaggagttcaagaccagcctggccaatatggtgaaccctcatctctactacaaaatacaaaaattagccggatgtggtggcgggcacctgtaatctcagctactagagggggctgaggcaggagaatcacttgaactcgggaagtggaggttgcagtgagccgagatgatgccaccgcactccagccagggtgacagagcgagactctacctcaaaaaaaaaaaagctgcatgcagatatatgtacttaaatatatagaaaagggactcacaggatatttaccatgtttccttctggggagaagcgaggcaattcctacttgttggtatgggaagagcacctaccagggcagagtctgagagaaatatcctattaacctcaggaataatgttcaattctgggaaaaagccaggaagatggacatttatgtgttccatggcaatacacgtatacatattttaagagtattttataaccaaaatgtacgtatgccttcctggattttaaaaatacattaataccaaaagctaacaaagttatcaagtggaaaaaaatgcaagtctctgtctttacccacccaccactcacctgccttccccacttccaggcagccaccataaacaatgttcccttagatgtggaattgttcctttgtaagtaaatattgttgttaagagaaaatgctaatagcaagggttttctgcagcgaattttgatggctatgcattgggtgtggtcacgggaggagaaagaaattaaaccatccctccaatggagggggaaaaaaggaaagaaaggaagaaaggaaagagaagacgatgacccacaaaatgagtacctctgagtctgatccgaaacccttctacacatagtgtacaggcacaacagttgaccaccaggccttaattattattattattattttttttttttttaaagcagagtttcgcccttgttacccaggctggagtacaatggcacaatagcggctcaccgcaacctctgcctcccagattcaagcgattctcctgcctcagcctcccgagtagctgggattacaagcatgtgccaccacgcccggctaattttgtatttctagtagagacatggtttctccatgtaggccaggctggtctcgaactcccgacctcaagtgatctgcccgcctcggcctcccaaagtgctgggattacaggaatgagccactgcacccggccaatttttattattttaaaattgtatgtaaagatggagactcactatgttgcccaggttgaactcctgggttcaagcattcttcctgcctgcctaggcctcccaagtgctgggattacaagtgggagctactgcacccaaccctgccctttaaataatattgatgttaattagaataagagcagcagctattgtgcttgatcctgtttctttttctttctttttcttcttcttctttttttttttttttttttgagacagagtctccctctattgtccaggttggagtgcagtggcacgatctctgctcactgcaacctccgcctcctgggttcaagttattctcctgcctcaacctctggattagctgggattacagacgtgcctcatgcccggctaatttttgtatttttagtggagacggggtttcaccatgtttgccaggctggtgttgaacccctgacctcaagtgatccacctgcctgggcctcccaaagtgctgagattacaggtgtaagccaccatgcctggccctttttcttttttataaattgagacagggtctcgctttgtcacccaggctggagtgcagtggcacaaactctgcttgctacagcctcaacctcctgggtttgagcaatcctcctgcctcagcctctcgtgtagctgggaccacaggcacatgccaccatggctggttaatttttaaatttcctgtaaagacggggtcttgtagagaacagcctaggctggtctggaactcttgggctcaatcaatcctcctgcctcagcctctcaaagcgcttggattacagacgtaagccactgtgcctggcctacccatgggggtcccaactgccacattttctgccgcttgggttcacccatccctctcctccacccgtccctcctttctcagtattgtaaaacacaccccgacctcatatcattttacccagaaatatatcagtgtccatctaagcagataaaggcgttcttgcttgtttgtttttctaacgcccagtgtgatcgtcactcccagtacacgttaataaaaatttctgggctgggtgcagtggcttgtgcctgtaatcttagcactttgggaggccaagacaggggaatggcttgaggcaaggaatttgagaccagcctggacaacagagtgagacccccatctccacacacacacacacacacacacacacacacacaaattagcgcggcgtggtggtggaaggctgtggtctcagttacttgggaggctgaggtgggaggattgcttgagcccaggaggttgaggctgcagtgagccatgattgtgccactgcactccagcctgagtgacagagtgagaccctatctcaaaataaataaataagccaggcacttattaattctgtgactcccatctgtaatcatagcacttggggaggctgagacaggaaaattgctcaaacctgagagggggaggttgcagtgagcagagatcatgccactgcactccagcccgggcaacagagtgagtgagacttcatctcaaaaaataataataataaatgaataataatttcttaccatctaacaacaggtccccttttcaattctgtgcttttaaatgagaccagaggaagagctggaaagctttggaaacttgccaaacattgtaaagcacttaaatgaatgtcttcaagggctgtgctcaaagtgtgatccccaggcagggccaccaaaccaccctggagcttgctagaaatgcaaaatcccaggcccagggccccagatccagtggaactgaactaccgctggaccaaaaccaatggatcattaaagtttaaggttggctatctccactgtgtggaaggcagtggctggtcctctctgaattaatctactttttcttgaggcctggatcttgctggttgatagcagcttcactgagtcttcccaccagcagtgagagcctgccatgtgttaaacatcaaccaggcctatggggacagttgaggtcactgccgttgacaggctcctattctagtgcaagatacagacaagaagctaataaatgataaagaaatagagtaatcccaggttgtgattattaacatatgagttgtgcgaggcctccccaacaagcctattgaaattgcaccagcagagccaggtgcggtggctcacacccgtaatccctgcacttcaggaggctgaggtgggcggatcacctaaggtcaggagttggagaacagctggccaacatggtgaaactccgtctctactaaaagtacaaatattagctgggaatagtagcacctgcctgtaatctcagctactagggagactgaggcatgagaatcttttgaacctgggaggtggaggttgcagtgagccgagatcgcaccactgcactctagcctggttgacagagcaagcaagactcagtctcaaaaaaaaaaagaaaagaaaagaaaaagaaatggttccagcgcctaaggtgtcctccccctctggctttactttgccctgtggccctgtttccagatgctgggccatgcatcttactacttatttgctcattgcttttctcccaggccaggaagtaatcatcacacacagactgccatatacccacccttaggacacagaaggagtaggagaaatacttgttgaatgaaagctactatgacttttcaaacaatgagagtgcctaaaagtgatcaatacctgattagcgattgttttttaatacatctgattcctacccatgggaagagttcctatgtggaatgaggctacaattctttcactgaaaataaattgcaccctatcctgggtgctgctccaacctcacctcagggctgggagcctggtgctgccacacccttgccctgagcagaagaatccggaagaagcctttggccagagccgcaggtgagtcatttgaggactctatgcccttgtggccatccttcggtcacctgtctggaattttattttttttagcccccgggctctgcaccaaagagctggctttttttgttgttgttccagctatacctaaaagggaccagcctcattcatataaagatctcagatctctcaaaaggcatctacaaattaagagtaattctgctcaaaattaaaggaaaaacatttttttggcggaggagggaattgtgtagagttgaagaaatccaagagattgtaaagttcttgtggagggtggagtcagtgagaggaggcagagaaacaaggcgaaggcctttgcgctccatctggtatctgtgtccaatagatggtttcacccacagcatggcagagtccagcaaggatccaagaatatgcaggaatcagggaaatgatgaagacagcactttaaatgggagggatttttaagtaaatgctattaggccaatcaactggaagtctattcatttgcaaacagtaacatgaggcttcctcctcaaaccccaaacacatatacacgcacattccacagttccacacgggctcaagacccaaaccaaaaaaacaaattctatgagaatgcttgatacaagactaataaaaagaagactgggccaggtgcggtggtggctcatgcccataataccaacaccttgggaggcctaggcaggaggatcacttaaggccaggagtttgagaccagcctgggcagcacggtgagacccccgtcactacaaaaaatacaaaaattagctgggtgtgctcgcatgctcctgtggtcccagctactcaccgggctgaggtgggaggatcgcttgagcccaggaaatggaggctgcagtgagccccgattgagtgattgaacctgggtgacagagcatgaccccgtctcaaaaaagaaaaaaaaaaagaaactacactttcagggataatttctatagttggttactagagaagtttctttaaatatgtagagcaccatttaaacagaataataaaaaggctgtgagcagtggctcatgcctgtaatcccagcactttgggaggccgaggtgggcaaatcgcttgaggccaggagttcgagaccagcctggccaacatggcaaaaccccatctctatgaaaaatccaaaaattaagccgggtgtggtagctcatgcctgtaatctcagcactttgggaggccaaggcagacagatcacctgaggttgggagttcaagaccagcctggccaaaatggtgaaacctcgtctctactaaaaatacaaaaattagccaggtgtggtggtgcatgtctgtaatcacagctactcaggaggctgaggcaggagaattgcttgaacctgggacgcggaggttgcagtgagctgagattgtgccactgcactccagcctgggtgacagagcaagactctgtctcaaaaaaaaaaaaaaaaaaaaagagaaagaaaaatacaaaaattagccggacttggtggtccacacctgtaatctcagctgctcggaggctgaagcgggagaatcacttggaccagaccctggagacagaggttgcagcgagcagagattgcatcactgcactctagcctgggcaacagagtgagactccattttaaaataataagaagaagaagaagaagaaaaagagaaagaacactaaaaagatagtgcaatggtaacatgagcaaagagcttaaacaggtagttcactgaagaaggaatacaagtaaatacagtaaataccagaagagttgtcatcaccataccatttctaccatcagggcgcacagatactaaaatgacaaacaaacagaaaatgagacatagctggagataccgtcgaagaagggccaagaatgttgcttggcaaattcatgtaaaagagcagtaagatcttctttaaaaaagctgtgtgcagaaatatgtacttaaatacagtatatagaaaaaggactcaatggctacagacttcttaatcctggttatttctgtggagaagctagggagttcctacttgttatagtgtaccaagtggaacatccattgcaggtgaacttaccaggacacaggctctcttcttcgctgtcggcaggggtctaattcaattgatgggagcatttgagaacctaaatgtagcattagctaaaaactcttggacactacaccctcccttcttgcatttaccctatagcatgtacctgtatgattctgtaagtcctatagatactatgggggatggatccattacattctgtagcattgaacttcccaaatgctcacagcccttaggtcctaaacagcctgtggggtggcttttgcttgggccacaggctatattaaaatatattgcaatcaagcaggggaatagtttaatcttaaagcaagtggtttagcacctggtgtgagaatctcgcttgagccgcctgcctggccctaaaggggacatctctaaacatctgcctctggggttctgaagtgtgcagtggggagtcaccttcacagagaggacttgctgtgacctgtaagacaccatgcctcttctctttccttccgagtgctgcctgacagtgtcctaagtatttgtttgtggtggtttatcctccccaatcatggtaagctttgtgagatcaggggctttgttgcttttgttccccggggtccccaagccaggcctggcatctgggaggtgctcagagtgtatctgttacaggaacaagaaagtcttatccaccgcccatgcagcttaagtaaagcattgtatttactaaacactcgctgtggtccaaatgctttgttgagcaaggtagataagaggatggatgtttgtggactgaaagaaccagctcctgaccccacccttagtgctccaattctggctgagctctgggtgccccagggccttgctatcccttcccctccccctgcttcctctaagaatcttctccatccttcaagaccctcaggattgctgcgaagctctctcacccctggactggaccagaccacccgtagcctcccatagcaccctcctgtatcacctctgtaaatgctgggctggttatggaactgtccaccaagtgcgaaggtttatctcccactgctgatgggaagccccctgaagatggggatttttggcctcttttttttttttttctttgagacagggtctcgctgtcgcccaggctggggtgcagctgcacaatcatggctcaccacagccttgacctctcaggctcaagtaattctcccacctcggcctcctgggtagctgggagcacaggcgcgtgccaccatgcctagctaatgtttctattatttgtaaagactgagtcttcttatgttgcccaggctgctctggaactcctgggctcaagcgatcctccctcctcagcctcccaaattgttgggattacaggcgtgagccatcacgctagccagattttggcctctttggttgagtgtcagctccccagcacagggcctgggaatctgtggaatgaatgcacgagtagtaccagactgacaactggggcagaggtggggaatcccagcatggagggacctgggcagacctgggtggccagtctgaaaggtgatgcatgtgattcaacacctggcccgagaggggaccacttaggccttcccgggtgctcatgccacagacacatgcagaccctgggcacagcctgaatgaggcctttgttaggatgaagggtttggctttccaagccccccaagcgctctgcagacattacttttcacttatctctcccccatatcccaagaggttgagactatcattttcattttttttttttttttttttttgagacagagtcttgctctgtcacccaggctgaagtgcagtggctcgatttcggctcactgcaacctccgcctcttgggttcaagcgattctcctgcctcagcctcccaagtagttggaattgcaggcgggtgtcaccctgtcccgctaatttttgttattttttttttagtagagatggggtttcaccatgttggccaggctggtcttgaactcttggcctcaagtgatccacccacctcagcctcccaaagtgctgggattacaggtatgagccaccacgcccggctatcatttttattttaaaagtgtggaaactgaggcacggagaggttaggtcgcttccagtgagggatgaaggtgggttgaacctggagccctgggaccccaggtcagtgcagcctcacatggagccagctgcctcggtcctggttgcacttgaggccttgctggctctgacactgacaaagtttgaaagttccctcctaacctccctgagcctcagtttcttcgtctgtaaatagaaatatgcaaaggacccatttcacagggcatcgtgaagctcagatgacctcgtgcacagggcccaggtcaggtggggttcctgctgtgcggggctggccattcgcatccctgacctcctggcggtgcctgttccatgcccagcgagccccagaggaacaaatctttcactaatgctcattacgggttaagctgaaccccacctttcacatgcaagaggccttccctttcctgtgggaggcaggagggcatcctgattagcaccaagctctggacccaaggtttgaggtttggctctggggccttggacagtcttccaacttccctgtgggtgaaatagtcaaaacccatgtttccatctcagggatgtgaggaggatcttatctagatcaatgcccagaaatcataatgcactgtgcctggcacagagtcggtgcccaggcagggtctcagcctcattatcgatgccactcagccctcctgccctcctctgtggcctggcttaaagtcttcctggtggaattaggcgcccaagctcagaagtttcacctgttccaccaaggactccagagatcttcatagggatcccccaagtcttcgcttggacattatgatgtttcaccttaggtgtcaagatgaaggcacacgtggtgcccagacattagtcaaacattattctggtccaggcatggtggctcacacctataaacccaacacttaatctgtgcattttattttattttattttattttatttattttattgtttgagatggagtcttgctctgtcacccaggctggagtgcaatggtgcgatcttgactcactgcaacctccgcctcccaggttcaagtgattctcctgcctcggcctcctgagtagctgggattacaagcgcccaccaccatggctggctaatttttctattttaagtagagacagagtttcaccatgttggccaggctggtcttaaaatcctggcctcaagtgattcacccacctcagcttcccaaagtgttaggattacaggagtgagccactgcacccagtcaatctgtgcattttatactttgtaaactagatctctataaggttgatttaaaatgttaaaaaagaaagtaagcagctgggcacggtggctcatgcctgtaatcccagcactgtgggaggccgaggcaggtggatcacctgaggtcaggagttcaagaccatcctggccaacatggtgataccccgtctctactaaaaatacaaaaattagctgggcgtggtggcaggtgcctgtaatcccagctactcaggaggctgaggcaggagaatcactgaaacccaggaggcggaggttgcagttagctgagacccagcctgggcaacaagagcaaaactccatctcaaaaaaaaaaaaagaaagaaagaaagaaagtaaggccgggcgcggtggctcacgcctgtaatcccaacactttgagaggctgcggcaagcggatcacgaggtcaggagatcgagaccatcctggctaacacggtgaaatcccgtctttactaaaaatacaaaaaattaactgggcgtggtggcgggcgcctgtagttccagctactccagaggctgaggcaggagaattgcttgaacctgggaggcggaggttgcagtgagctgagattgcaccactgcactccagcctgggcgacagagcgagactccgtctcaaaaaaaaaaaaaaaaagaacgaaagaaagtaaatatatatccatatatggaaaaggctaattttatggaggtcgttgtgattctaaccattgtagagggtacctaagaggaaagggagactgatcctaacaactcggacctgaccctggcatgctgctcagcctcactcagggtgggaagcctgggcactcccacactgtgtcctgtgctgccttcattgaaagaagtcagaagaagccttaggccagaggcacaggtaagtcatttgagaactctatgcccttgtggccatcctctgggccacctgtttggattttgatttgataacccagggtttctcaacctcagcactgttgacattttggaccagataatgctttgttgtggggactgtgcttgtaggatgtggagcagcattgctggcctctacccactagatgccaggggcaccctccctagtcatgacaaccaaaacatatccccgaacctagctgaatgtcccctggggggtcgggggcactaaatcgccttggttgagctactgctttaatataagacttctgccccagggcttgccctttctagactgaaaagagaccttatctcagcctcattagtagaaagatatccagtctttaaatctacccattctgagtaattccacacaaaattagagcaagatttgtttatgtgttggaaggtggggaagaacaggacacattggttctataaccttactggaagacttgaacgagggagatgaggcagaaattgaaacaaggctgaaagctacaataatcaaaacagtctggcctcaacataggaatagactcagtgggacagaatcataggaatagaatcaactaaacaggtaagagggtgcagaagaaggcacatggatagaggtcagctcattatatgattaaaggtgacatttccaggccaggtgccatggctcttgcctgtaatcccagcactttgggaggctgaggtgggcgaatcacctgaggtcaggagtttgagaccagcctgaccaacatggcgaaaccctgtctctactaaaaatacaaaaattagccgggcgtgatggtgggcacctacaatccaaactactcaggaggctgaggcaggagaattgcttgaacccgggagatggaggttgccatgagccgagattgcgccactgcacttcagcctgggcgacagtgtgtgactccgtctcaaaaaaagaaaaaaaaatgcatatcaaatgtgcactttgttttggagtggattatcttgttggcaaaaaattgaggactggtaaagtaactctcctccctacaacatctggatttagcacttttcctgcattgctgtagggaagatgagggagtgggaccttttagagactgtagtctcctacagccttaccctggcagcccccaggccctaaatagcctgtggatgtgtttgtttgtgccacaggttactttaaaaggcagcttgactcagcttgttagggtgtgtgctcagcacctagtgttcacacatttttgacacctgcctggccctgaagggtgagttactaaaccactatgttccctggttccttcaaatgcaaaatgaacatataatccttcctacctcacagggttcatacaaggattaaatgaactagtacatgcagagggctggtgaggaacatgcggtaggcctgttagccatgcggcatatgaaaaaagcctaacaaaagtgaaaaaaaaaaaaaaggccaggctcagtggtccccacctggaatcctgtcactttgggaggctgaagtgggagaactgctcgagggccaggggttcaaaaccagcctgggcaacatactgtgacctcgtctttgaaaaataataataataataataacataacaaaaaaaatcctaacatcctaacacggcagttattatcttttttttttttaagatgagatcacggcactgcactccagcctgagcaacaagagcgaaatctccgtctcaaagaaaaaaaaaaaaatttatgttgctatgttgcccaggctgatgactccactattgttattaaaaaagaatttggctgggtgcggtggctcatgtctgtaatcccagcactttgggaggctgaggcgggaggatcacctgaggtcgggagttcgagaccagcctgaccaacatggagaaaccccatctctactaaaaatacaaaaattagccaggtgtgttggtacattcctataatcccagctacccaggaagcaggagaattgcttgaacccgggaggcggaggttgcagtgagccaagatcatgccattgcactccagactgggcaacaagagcaaaactctgtctcaaaaaaaaaaaaaaatacaattcattatgagccagatgtgatagctcatgcctataatcccagcacttcgggaggccaatgcaggtggatcatttgaacccaggagttggaaaccagcctgggcaccatgggggaaaccccctctctgcataaaatacaaaaatcaaccgggcaaggtggcatgcac

SEQ ID NO: 109 - DNA, 978 bp, human
cgaaaatggctaaattcgtgatccgcccagccactgccgccgactgcagtgacatactgcggctgatcaaggagctggctaaatatgaatacatggaagaacaagtaatcttaactgaaaaagatctgctagaagatggttttggagagcaccccttttaccactgcctggttgcagaagtgccgaaagagcactggactccggaaggacacagcattgttggttttgccatgtactattttacctatgacccgtggattggcaagttattgtatcttgaggacttcttcgtgatgagtgattatagaggctttggcataggatcagaaattctgaagaatctaagccaggttgcaatgaggtgtcgctgcagcagcatgcacttcttggtagcagaatggaatgaaccatccatcaacttctataaaagaagaggtgcttctgatctgtccagtgaagagggttggagactgttcaagatcgacaaggagtacttgctaaaaatggcaacagaggagtgaggagtgctgctgtagatgacaacctccattctattttagaataaattcccaacttctcttgctttctatgctgtttgtagtgaaataatagaatgagcacccattccaaagctttattaccagtggcgttgttgcatgtttgaaatgagggaattccctctgttccttcatctccgaggccgagagcctctgccagaactggcggggatggcgcaaacagtcagcggggcccaattcccccactggcggcggtggcggaggtggcagtggcggtaccagaatgcgagatggactggtgatcccattggtggagctgtcagcaaagcaggtggcatttcatatcccatttgaagtggtggagaaagtttacccaccagtgcctgagcagctacagctccgaattgctttttggagcttccctgagaatgaagaggacattcggctgtattcgtgcctg

SEQ ID NO: 110 - DNA, 6359 bp, human
ggcctggctgttgctcaggtgaccagcttgtgtctctgggagggcgctgctttccccggccacccggcgcgatgatccagaatgtcggaaatcacctgcgacggggcttggcctctgtgttctccaaccgcacatcccggaagtcagccttacgtgcggggaacgacagtgccatggcagacggcgagggataccggaaccccacggaggtgcagatgagccagctggtgctgccctgccacaccaaccaacgtggtgagctgagcgtcgggcagctgctcaagtggattgacaccacggcttgcctgtccgcggagaggcacgctggctgcccctgtgtcacagcttccatggatgacatctattttgagcacaccattagtgttggacaagtggtgaatatcaaggccaaggtgaaccgggccttcaactccagcatggaggtgggcatccaggtggcctcggaggacctgtgctctgagaagcagtggaatgtgtgcaaggccttggccaccttcgtggcccgccgagagatcaccaaggtgaagctgaagcagatcacgccgcggacagaagaggagaagatggagcacagtgtggcggctgagcgccggcgcatgcgccttgtctatgcagacaccatcaaggacctcctggccaactgcgccattcagggcgatctggagagcagagactgtagccgcatggtgccggctgagaagacccgtgtggagagtgtggagctggtcctgcctccccacgccaatcaccagggcaacacctttgggggccagatcatggcctggatggagaatgtggccaccattgcagccagccggctctgccgtgcccaccctacgctgaaggccattgaaatgttccacttccgaggcccgtcccaggtcggcgaccgtctggtgctcaaagccatcgtgaacaatgccttcaaacatagcatggaggtgggcgtgtgcgtggaggcctatcgccaggaggctgagacccaccggcgccacatcaacagtgcctttatgacctttgtggtcctggacgcagatgaccagccccagttgctgccctggattcggccccagcccggcgatggtgagcggcggtaccgagaggccagtgccagaaagaagatccgcctggacaggaagtacatcgtgtcctgtaagcagacagaggtgcccctctccgtcccctgggaccctagcaaccaggtgtacctgagctacaataacgtctcctccttgaagatgcttgtggccaaggacaactgggtgctgtcctcggagatcagtcaggtccgcctgtacactctggaggatgacaagttcctctccttccacatggagatggtggtgcatgtggatgcagcccaggccttcctgctgctctcggacctgcgtcagaggccagagtgggacaagcactaccggagcgtggagctagtgcagcaggtagacgaggacgacgccatctaccacgtcaccagccctgccctcggaggtcacacaaagccccaggacttcgtgatcctggcctcgaggcggaagccttgtgacaatggggacccctatgtcatcgcgctgaggtcggtcacgctgcccacacaccgagagacgccagagtacagacgcggagagaccctctgctcaggcttctgcctctggcgcgagggggaccagctgaccaagtgctgctgggttagggtctccctgactgagctggtctcggcaagtggcttctattcctgggggctcgaatccaggtcaaagggtcgcaggagcgacggttggaatggaaaactagctggaggacacctgagtactcttaaagcaatccccgtggccaaaatcaacagccgatttggataccttcaagacacctgaaaccttatcatgagccagatgccaaggaagagactctgggaggatccagaggaccccctggttgcagccacgtagagactgacgctgaggaggactccaactatcatgagcaacacccgtcgaacacagccaccccgctaagaacagatcaagaagctgtcacagatggcggaagaaaacctgaggaaagcgggacaaccagtcacaatgaataatttaatggtagctatgatagcagttatcaccactgccgtgagtattccttcaataagggctggtaataatgcctggatgcaatcattctatgacacagttacacatgctttctgatctcagtatttaccataataaatcggctcctataattgaggcataccaccctcaaaaacctatttgtaaacaggattggacccagttagaaaaaatgaacgtacttatttaggaagattgctttgcagaataggcagagatgctgcacaacgattcctatggaatcattactaattggtcccccaaggggatgtttagcttgaattgcacctctcagtctgcatgccacggtcacactatgttcagatgatctgaacaaaacagtcagatggtagaaatgttaagtacggcaaaagttcctattatctggaaccatggcggtatagtggcacctcaacctcaaataatatggcccgctctaggagctaaacataaggatttgtaaaaactattaaatgctcttaataagatcaaaatttgggaaagaataaaagagtatctagaaggacactctacaaacttgtttttggatatagcaaaattaaaagaacaaatatgtaaagcatcccgggcaacctgaccttaatgccaggaaccagagtgcttaaaggagctgcagaaaaattagcagctagtaacccatttaaatgggtaaaaacacttggaagctctgtgatttcaatgatgactatgctttttaatctgttgtttgcctttgtatagtctgcagatgcggatcccgactcctgcgagagtctctttgcaaatcgaagaagggagacatgttgggagcaagccccccagagtctggccataaactggccccaaaactggccataagcaaaacctctgcagcactaaaacatgtccataatggccctaacgcccaatctggaaggttgtgggtttatgggaatgagagcaaggaacacctggcctgcccagggcggaaaaccgcttaaaggcattcttaagccacaaacaaaagcatgagcgatctgtgtcttacgggtgtgttcctgctgcaattaattcagcccatccctttgtttcccataagggatacttttagttaatttaatatctatagaaacaatgctaatgactggtttgctgttaaatgaaggggtgggttgcccctccacacctgtgggtgtttctcgttaggtggaacgagagacttggaaaagagacacagagacaaagtatagagaaagaaaagtgggcccaggggaccagcattcagcatacagaggatccacactggcaccggcctctgagttcccttagtatttattgatcattatcgagcatggcaggataataggataatagtggagagaaggtcagaaggtaaacacatgaacaaaggtctctgcatcataaacaaggtaaagaattaagtgctgtgctttagatatgtatacacataaacatctcaatgccttgaagagcagtattgctgcccgcatgtcatacctacagccctaaggcggttttcccctatctcagtagatggaagtatattccatgtaaagtaaatcggctttacacccagacattccattgcccagagacgagcaggagacagaagccttcctcttatctcaactgcaaagaggtgttccttcctcttttactaatcctcctcagcacagaccctttatgggtgtcgggctgggggatggtcaggtctttcccttcccacgaggccatatttcagactatcacatggggagaaaccttggacaatacctggctttcctaggcagaggtccctgcggcctttgcagtattttgcgtctctgggtacttgagattagggagtggtttgagattagggagtggtgatgactcttaaggagcatgctgccttcaagcatttgtttaacaaagcacatcttgcacagcccttaatccatttaaccctgagttgacacagcacatgtttcagggagcacagggttgggggtaaggttacagattaacggcatctcaaggcagaagaatttttcttaatacagaacaaaatggagtctcctatgtctacttctttctacacagacacagtaacaatctgatctctcttttccccacagttaataaatatgtgggtaaatctctgttgggggctctcagctctgaaggctgtgagacccctgattttctacttcacacctctatatttttgtgtgtgtgtctttaattcctctagcgctgctgagttagtgaccgagctggtctcggcaggggtgggcgggtcttttgagttcaggagttcaggagcagcctggccaacatggtgaggccccttctctactggaaatatgaagattgtccgggcatggtggtgtgcctctgtactttcagctactcgggaagctggggcacaagaattgctggagcatgggaggtgggggctgcagtgggctgagatcgtgccactgcactccagcccgggcgatagagtaagactctgtctcaaaacaaaaagagttttaggccaggtgtggtggctcacgcctgtaatcccagcactttgggaggctgaggtgggcagatcacctgaggtcaggagttcgagaccagtctggccaacatggcgaaaccccatctctctctactaaaaatacaaaatttagccaggtgtggtggtgggtgcctgtggtcacagctgcttgggaggctgaggcaggagaattggttgaacccaggaggcagaggttacagtgagcggagatcgtgccactgcattccagccggggtgagagagcgagactctgcctcaaaaaaagaaggcttagtgtgcaactcatcagagttgcacagggcagagaaagaatgggaaaaaaaacaatttctagaaaacttttcgaattttctgatcaacaccaaatattccaaataggaaaaatacaaaaaaatccatacctatatgtggcataatatgattgtagagcaccaaagtaaaagatcttattttttattaaaattaaaaaaaaattaaaatagagggtctcactatgctgcccaggctggtcttgagctcctggcttcaggctatcctcccaccatggcatcctaaagtgctgggattgcaggcatgagctgctgcatctggcccaaagtaaaagatcttagaagcagccagaaaaaatagatttgggctgggcatgaatagattgatcaccaaaaaggtggcagactaacttctcgacagaatccacagaagccagaaggcagtggaacattagctttgatgtactaaaataaaataccacgctaggctcctacatacagtgaaaatgttttgagaatgagaattataattttttggcaaacaaaactaaaggagtttacaactaagaaactcttttgtgagacggccttgctctgttgcccaggctggagtgcagtgacgaaatctcagctcactgcaacctcggcctcccgggttcaggcaattcttgtgtctcagccttccaagtagctgggattacagatgtgcgccaccaggcccagctactttttatatttttagtggagatggggtttcactgtgttggccaggctggtctcaaactcctgacttcaagtgatctgcccgccttggcctgctaaagtgctgggattacaggcatgagcgactgtgcctctccagtccctgtgtttttttttgtttttggaggttttatttgtttgtttttggaggcactttcactgtgttgcccaggcctgtctgttggcctcaagtgatcctcctgccttggatctcccagggtgctgggattacaggtgtgaaccactgtgctcagcccattttttatttgtttcttgaaggaaggtagcagtattaattaattttggactttgctcactaaagtttgaatgttaagaatagatgtatacagtctggatgcagtggtgcatgcttgtaattttagcactttggggggctgaagcgggaggatcgcttgggctcaagagtttgagaccagcctgggcaacatggtgaaaccttgtctctacaaaaaaattttaaaaaattagccagacatgatggcatgcacctataatcccagctacttgggaggctgaggtgggaggattgcttgagtccagggaggtcgaggctgcagtgagccatgatcacaccactgcactccagcctgggtgacagagtgatactgtctc

SEQ ID NO: 111 - DNA, 4257 bp, human
atgattcgcctcggtgctccccagtcgctggtactgctgacgctgctcgtcgccgctgtccttcggtgtcagggccaggatgtccggcaaccaggaccaaagggacagaaaggagaacctggagacatcaaggatattgtaggacccaaaggacctcctgggcctcagggacctgcaggggaacaaggacccagaggggatcgtggtgacaaaggtgaaaaaggtgcccctggacctcgtggcagagatggagaacctgggacccttggaaatcctggcccccctggtcctcccggcccccctggtccccctggtcttggtggaaactttgctgcccagatggctggaggatttgatgaaaaggctggtggcgcccagttgggagtaatgcaaggaccaatgggccccatgggacctcgaggacctccaggccctgcaggtgctcctgggcctcaaggatttcaaggcaatcctggtgaacctggtgaacctggtgtctctggtcccatgggtccccgtggtcctcctggtccccctggaaagcctggtgatgatggtgaagctggaaaacctggaaaagctggtgaaaggggtccgcctggtcctcagggtgctcgtggtttcccaggaaccccaggccttcctggtgtcaaaggtcacagaggttatccaggcctggacggtgctaagggagaggcgggtgctcctggtgtgaagggtgagagtggttccccgggtgagaacggatctccgggcccaatgggtcctcgtggcctgcctggtgaaagaggacggactggccctgctggcgctgcgggtgcccgaggcaacgatggtcagccaggccccgcagggcctccgggtcctgtcggtcctgctggtggtcctggcttccctggtgctcctggagccaagggtgaagccggccccactggtgcccgtggtcctgaaggtgctcaaggtcctcgcggtgaacctggtactcctgggtcccctgggcctgctggtgcctccggtaaccctggaacagatggaattcctggagccaaaggatctgctggtgctcctggcattgctggtgctcctggcttccctgggccacggggccctcctgaccctcaaggtgcaactggtcctctgggcccgaaaggtcagacgggtaaacctggtattgctggcttcaaaggtgaacaaggccccaagggagaacctggccctgctggcccccagggagcccctggacccgctggtgaagaaggcaagagaggtgcccgtggagagcctggtggcgttgggcccatcggtccccctggagaaagaggtgctcccggcaaccgcggtttcccaggtcaagatggtctggcaggtcccaagggagcccctggagagcgagggcccagtggtcttgctggccccaagggagccaacggtgaccctggccgtcctggagaacctggccttcctggagcccggggtctcactggccgccctggtgatgctggtcctcaaggcaaagttggcccttctggagcccctggtgaagatggtcgtcctggacctccaggtcctcagggggctcgtgggcagcctggtgtcatgggtttccctggccccaaaggtgccaacggtgagcctggcaaagctggtgagaagggactgcctggtgctcctggtctgaggggtcttcctggcaaagatggtgagacaggtgctgaaggcccccctggccctgctggacctgctggtgaacgaggcgagcagggtgctcctgggccatctgggttccagggacttcctggccctcctggtcccccaggtgaaggtggaaaaccaggtgaccagggtgttcccggtgaagctggagcccctggactagtgggtcccaggggtgaacgaggtttcccaggtgaacgtggctctcccggtgcccagggcctccagggtccccgtggcctccccggcactcctggcactgatggtcccaaaggtgcatctggcccagcaggcccccctggggctcagggccctccaggtcttcagggaatgcctggcgagaggggagcagctggtatcgctgggcccaaaggcgacaggggtgacgttggtgagaaaggccctgagggagcccctggaaaggatggtggacgaggcctgacaggtcccattggcccccctggcccagctggtgctaatggcgagaagggagaagttggacctcctggtcctgcaggaagtgctggtgctcgtggcgctccgggtgaacgtggagagactgggccccccgggaccagcgggattgctgggcctcctggtgctgatggccagcctggggccaagggtgagcaaggagaggccggccagaaaggcgatgctggtgcccctggtcctcagggcccctctggagcacctgggcctcagggtcctactggagtgactggtcctaaaggagcccgaggtgcccaaggccccccgggagccactggattccctggagctgctggccgcgttggacccccaggctccaatggcaaccctggaccccctggtccccctggtccttctggaaaagatggtcccaaaggtgctcgaggagacagcggcccccctggccgagctggtgaacccggcctccaaggtcctgctggaccccctggcgagaagggagagcctggagatgacggtccctctggtgccgaaggtccaccaggtccccagggtctggctggtcagagaggcatcgtcggtctgcctgggcaacgtggtgagagaggattccctggcttgcctggcccgtcgggtgagcccggccagcagggtgctcctggagcatctggagacagaggtcctcctggccccgtgggtcctcctggcctgacgggtcctgcaggtgaacctggacgagagggaagccccggtgctgatggcccccctggcagagatggcgctgctggagtcaagggtgatcgtggtgagactggtgctgtgggagctcctggagcccctgggccccctggctcccctggccccgctggtccaactggcaagcaaggagacagaggagaagctggtgcacaaggccccatgggaccctcaggaccagctggagcccggggaatccagggtcctcaaggccccagaggtgacaaaggagaggctggagagcctggcgagagaggcctgaagggacaccgtggcttcactggtctgcagggtctgcccggccctcctggtccttctggagaccaaggtgcttctggtcctgctggtccttctggccctagaggtcctcctggccccgtcggtccctctggcaaagatggtgctaatggaatccctggccccattgggcctcctggtccccgtggacgatcaggcgaaaccggccctgctggtcctcctggaaatcctggaccccctggtcctccaggtccccctggccctggcatcgacatgtccgcctttgctggcttaggcccgagagagaagggccccgaccccctgcagtacatgcgggccgaccaggcagccggtggcctgagacagcatgacgccgaggtggatgccacactcaagtccctcaacaaccagattgagagcatccgcagccccgagggctcccgcaagaaccctgctcgcacctgcagagacctgaaactctgccaccctgagtggaagagtggagactactggattgaccccaaccaaggctgcaccttggacgccatgaaggttttctgcaacatggagactggcgagacttgcgtctaccccaatccagcaaacgttcccaagaagaactggtggagcagcaagagcaaggagaagaaacacatctggtttggagaaaccatcaatggtggcttccatttcagctatggagatgacaatctggctcccaacactgccaacgtccagatgaccttcctacgcctgctgtccacggaaggctcccagaacatcacctaccactgcaagaacagcattgcctatctggacgaagcagctggcaacctcaagaaggccctgctcatccagggctccaatgacgtggagatccgggcagagggcaatagcaggttcacgtacactgccctgaaggatggctgcacgaaacataccggtaagtggggcaagactgttatcgagtaccggtcacagaagacctcacgcctccccatcattgacattgcacccatggacataggagggcccgagcaggaattcggtgtggacatagggccggtctgcttcttgtaa

1. A method of assessing breast cancer status comprising identifying differential modulation in a combination of genes selected from the group consisting of SEQ ID NO 1-111.

2. The method of claim 1 wherein the expression pattern of the genes is compared to an expression pattern indicative of a relapse patient.

3. The method of claim 2 wherein the comparison of expression patterns is conducted with pattern recognition methods.

4. The method of claim 3 wherein the pattern recognition methods include the use of a Cox proportional hazards analysis.

5. The method of claim 1 conducted on primary tumor sample.

6. The method of claim 1 wherein the combination includes all of the genes corresponding to SEQ ID NO 1-35.

7. The method of claim 1 wherein the combination includes all of the genes corresponding to SEQ ID NO 36-95.

8. The method of claim 7 used to provide a prognosis for ER negative patients.

9. The method of claim 1 wherein the combination includes all of the genes corresponding to SEQ ID NO 96-111.

10. The method of claim 9 used to provide a prognosis for ER positive patients.

11. The method of claim 1 wherein the combination includes all of the genes corresponding to SEQ ID NO 36-111.

12. The method of claim 1 wherein there is at least a 2 fold difference in the expression of the modulated genes.

13. The method of claim 1 wherein the p-value indicating differential modulation is less than 0.05.

14. The method of claim 1 further comprising a breast diagnostic that is not genetically based.

15. The method of claim 14 wherein said diagnostic is ER status.

16. A prognostic portfolio comprising isolated nucleic acid sequences, their complements, or portions thereof of a combination of genes selected from the group consisting of SEQ ID NO 1-111.

17. The portfolio of claim 16 wherein the combination includes all of the genes corresponding to SEQ ID NO 36-95.

18. The portfolio of claim 17 used to provide a prognosis for ER positive patients.

19. The portfolio of claim 16 wherein the combination includes all of the genes corresponding to SEQ ID NO 96-111.

20. The portfolio of claim 19 used to provide a prognosis for ER negative patients.

21. The portfolio of claim 16 wherein the combination includes all of the genes corresponding to SEQ ID NO 36-111.

22. The portfolio of claim 16 in a matrix suitable for identifying the differential expression of the genes contained therein.

23. The portfolio of claim 22 wherein said matrix is employed in a microarray.

24. The portfolio of claim 23 wherein said microarray is a cDNA microarray.

25. The portfolio of claim 23 wherein said microarray is an oligonucleotide microarray.

26. A kit for determining the prognosis of a breast cancer patient comprising materials for detecting isolated nucleic acid sequences, their compliments, or portions thereof of a combination of genes selected from the group consisting of SEQ ID NO 1-111.

27. The kit of claim 26 wherein all of the genes correspond to SEQ ID NO 36-95.

28. The kit of claim 26 wherein all of the genes correspond to SEQ ID NO 96-111.

29. The kit of claim 26 wherein all of the genes correspond to SEQ ID NO 36-111.

30. The kit of claim 26 further comprising reagents for conducting a microarray analysis.

31. The kit of claim 26 further comprising a medium through which said nucleic acid sequences, their compliments, or portions thereof are assayed.

32. Articles for assessing breast cancer status comprising materials for identifying nucleic acid sequences, their complements, or portions thereof of a combination of genes selected from the group consisting of SEQ ID NO 1-111.

33. The articles of claim 32 wherein all of the genes correspond to SEQ ID NO 36-95.

34. The articles of claim 32 wherein all of the genes correspond to SEQ ID NO 96-111.

35. The articles of claim 32 wherein all of the genes correspond to SEQ ID NO 35-111.

36. A method of treating a breast cancer patient comprising characterizing the patient as high risk for recurrence or not based on the expression of a combination of genes selected from the group consisting of SEQ ID NO 1-111 and treating the patient with adjuvant therapy if they are a high risk patient.

37. The method of claim 36 wherein all of the genes correspond to SEQ ID NO 36-95.

38. The method of claim 36 wherein all of the genes correspond to SEQ ID NO 96-111.

39. The method of claim 36 wherein all of the genes correspond to SEQ ID NO 36-111.
